United States Patent Application Publication US 2020/0329713 A1 - sequence listing, part 6

SEQ ID NO: 2 - DNA, 6618583 bp, Bacillus thuringiensis (residues 3,309,293-4,963,938 of 6,618,583)
gctgtcttcatagattcagcgatagtttggaagtccgagtgataacgctcaccaagaaacgaaagcatttttgaaaacttcactcggccatctacaacttgacctaaatgtgagaataacggaacatcattaaagtctaaatatccatctgtctctttatttaaatcaaacctacttattagtttcgtagcaaaaaggtgcatttgtgaaaaaatatgtttttcatcttttatatgttttatccaatttgacaaatcggttgtaattgattgtatgtctgtgatttcatcttcagtaacttttaaagtacttactttttgataacccttatgaaaaagttctgttgaaagttgtgcatttttaaccataaaatatggatcggtaataatgaaacagtcttcttcgggctcatatcctacaataacaaatgaatgaacaatatgattttttagataattctcatcccaaggaagccagtatgcattcatggttaccaccacaggaaatcccgagtataattgttctaatataatttcaaatccttcatcggatgaatctgtatcaaatatagtactttttataccatgatatttttctaaatcacttacaaaataaccagactctgtatataaaccatcccctagatttccattatcgacaggagaaaaaccaaaatcccataatctagcgtacattaaataatgtttacgcttaaaccaattagctaacgtagcaattacatcatcaatacaattctgttcagaacttttacaaggctcaacatcatataagattgaagaagtataatttcccatttactcacctctatatttttaccaacaggaaaaactattgtaatttggttatttctctatactaagttgacagagatatgtatatcttctttaaaaatctatcaattattattaacgcatttcatataaagaatcttatttctcgaatcacttttttattttaatcattctataataaggaggagaattccctaactcatagtcaccagaataaacactaacattccagaaagctaagagggaaagctcctttaatcccacagtatagcaagtgtaaatttaaactcttaaaagtcgtgtttacaatatgaagtaatactaattatttttcttttctgctatataagcagctagttgtttaatattgcgttttgtatatgcgactaagtcgtccgtattaagattctcgttttctaaagcaagatcaagctcaatagctagtagagaatttcctcctaagtcaaagaaatcatcctctacaccgacagcttcaatcttcaatatacttttccatatttcaaccaaacgagattctaactcattactaggagacatcatactctcctcctcattcttaggtaaagatctaggtgaaggtaaggaatgtcgatcaacctttccacttggtgttaatggtatgttttcaacttcaacaaagaaagtaggtatcatataactcggaactaatttagcaagatgcaatttcaaatcagaaatggatacaggtgattttgctacgaaataagctacaagttttttctgcccatcttcatcttgaatgtctactatcactgcttctttaattgcatgatgtgaagataaagcatctaaaatttcccctggctcaattcgatatcctctaatttttaattgttcatcatttctaccgaggaattctatattcccatcaggtaaccagcgtgaaagatctcctgtcctgtacattttctccccttttacaaatgggtctggtaaaaacttttcttcagttaatctcatttgatttacatatcctcttgcaagcccttctcccgcaatatacagctctcctaccgcgccaataggctgaagtctctgtttttgattaagtatataaagccttacattcggaataggctttccaataggaatagtattatagttttcactttcttgaagtgaaaacgtacttgcgataactgtcgcctcagtaggaccatacatattttctatttgagtcgatagtcgatgctttttaaacttattaaccacctcatgtgtcaaagcttcacccgcaagtaatatatacttcactttatttaaaacctggcaattttcattattaagtgtatttacgaaagctctaaacatagacggtacaaaatttaataatttcacatcatatttatctatagttcttaaaattgctcttgggtttcgatgttccccattgtccattattactaatttactacctactatggtccacccaaacaactctagaacagatacatcaaatatataaggtgtctttagtaaatacgtatctgattcatccataggatataaatgagacattgaaaataagaaattcacaatactacaatgttcaatcatgactccttttggtctacctgtagaaccggaggtgtataaaatataagctaagttatttgattttccagcaacttccaggttgcttgtatcaccaacgtacaaattttcttgctttaaatcaataatctctcctacaaatggaatttcacctacgtatttagattctgtaagtacaaattgaggattacaatcctctaaaatatgttccattcgacgctttggatattcaggatcaattggtacatatgcagctccagattttagcgcagcaaatatagctataatcatttctacggatctttccacaacgataccaattttagtttcctgatctacacctttttgtctaagaatacgagcaagctgatttgctcgattattgatatacgaataactgtacggtatatcatttgaaataactgcgatttcttctggtttattttcaacctgatcctcaaaaaattgatgaactaatttaccctgagtaaaatctaattttgtattattaagttcatttaacatccttgtggattcacttttacttaaaacattaacgtcttcaattttcgcttcaggattagctaccatccactctagcgtatttataaaatgcatcataaaccgctctatagtttgcggataatatagtcctgtcgcgtattccaattctaatcgcagaccctcttcttccggaaatacttctatactcatatctacctttgaagcttgatgcttaatttcgtatgatttaaatgtaatatcttttattttttctgatgttcttccgatattctgcattactaacatgacatcaaatacaggatttcgattagtatgataagccatgtctaacttatttactaactcatcaaatgggtattcttgatattgaaatgcttctagcgcattttcttttacttcatttaagaattgaattatcgtcttttccgctttaggatgatttctcataggtagagtatttacaaacatacctatgataggctcaagatcatgatgaattcttcctgcaattggagaacctactataatatcttcctgttgcgtatacacatgcaatactatatttagtgacgaaagaagtaccatatataaagtagcttctctttcatccgcaaaggattttaatttattagaaagttcaggtgttaaatggaatactaatctatcaccttcaaaagtttgatttagcccacgtggcttatcggttgggaacataagaattggtaactcacctttaaacttctctacccaatactcttcaatttctttcagcccttcatcatgtaaacggttggtttgccaattggcataatctttgtattgtattttaataggctctaaggctttgcctgaatataaatctataaactctttttctaacttcgctaaagatactccatctgctattatgtgatgaagatcaaatagtaacagatattgattgaattctaatttcattaaaccgacgcgcataagtggagccctatctaactgaaaaggacgaacaaattcctgtattagctcttcaattgttgatctatcagatttatataaatgttcaattctaatatctaaactatcatgaataaattgaactggttcacctttaataaattggaatgaagttcttaatgattcatgacgttctactaattctttgacacattgttctgcctttataaaatcaaactcaccttctattaacattgcacctggtatattgtaggcagttcctattccagcaaagcggtttaatatatataatcttttttgtgaagaagaagtttgataaaattctctatcaggtacgatctcaatttgagaataatttttcttcccttcatatttctctatatactccgctaatagcataattgtaggcctttgaaacatttcacgtataggtacatctacacctaaacgtttatatatgtgtgaaacaacagaagtaatttgtaatgaattacctcctaattcgaaaaagttatcattcacacctattttctctattccaattactactttccatatctcagagagcatttgttcaatttcattacgtggttcaataaataaagctgtggattgctcccaaattggatctggaagagctttccgatctattttaccgtttgatgagattggaaactgctcaatcgggatgatgtatgcaggaatcatataaaaaggtaaatactctctaaggaattggcgtacctcttctactttagctgaagaattcataacaacatatgcacataaaaccggagcatcttctccctcttttttacgtgtaattacaatagcttcaccaatttcaggatatcgtaatagttgcttttctatttctcctaattcaattcgtaatccacgaattttgacttgatcatccatacggcctaaatattcaagatttccatctggtaaccagcgagccaagtctccagtacgatataccttgtcatctataatagaagaacctgttttggtgatttgtataggaacaaatttgtccatagttaacttaggttgatttaaataccctcttgctagcccttctcctgaaatacacaactctccaggaattccaacgggttgtaattgttgattatcacccataatataaactttttgattggctagaggtcgtcctattggtaattgattcataagttctaacttatcgtgctgaacatgataacatgtagaatctacagtagtctccgtaggtccataagcatttgttaaattaggttggcagttcttattaaataaaccaaggaatttccgcgctaatttcggtggtaattcctctccagcaataataaaatgtttaaatgaatattctattttttcatctataaaattagttaataatcgaagatgcatcggcgttccatccgcgatatttatttgcttttcttgataaaaattaattagcttctgcccatcagttcttgcttcctctggtactataaataaactatttcctaataaaagcgcaccaaacatgttttgtactgaagcgtcaaactcaaaaggtgaaactaacccgattcgcatagaggaactatatttatcatatatttcattttttaacccgaatattaaatttacaacactacgattttcaatcataattcctttaggattacctgttgttccagaggtaaagataacatatgccaaatcgtaaggtgtacttactgaaggtaaactaaccaattctgtttcaagtagttcattaaaacttaccatactacaatcctggatttcccttgtaaaatcttcactaataacttctggttttactatacaaagtggagatttacattcttttagcattgcctctatccgtttatacggcaaatatatgttaataggtaaataagcagccccactttttaaaatacctagcaatgcaattactgcatcaattgatcgatccatcataaggccaacaatgtgtccttttccaattccttttttatgtagagaactggcaaccagatctaccttttcttttaattgagcgtatgttatttctcttttgtcatcagaaacagcaagtttatttggattatgcatgacttgttcttcaaataactgtatcaccgttaaatgatgcgggtaatctaactcagtttgattaaatgtgattaactctcttatatcattatcactaacccaatctaaatctatatgcggcgtattcggttgtagtaaagcttgctctaacaagtctataaaatgatgaccaaatcgcataacagtagatgttttgtatagatgctcattaaaatacatatcaacttctatacacccatttacttgacggaaagagaatataatctcagcattgctctcacttaaataatttaaatcttgaatttcctctagcaaaattgcagtacggaacggataattacgcccctctggaaggtagttactcaaaaccggttgtaaactttccaatgggaaattttgatgttctaaagcattaaccattactgtactaacatgctggagaatttgtctaaatgtcatatgttcctcaagaccatgtcttaaaactaacaaattattaataaggttagtatcactgtcttgttttaaaacaggtgtaccaatgcatatatcttgcaatctagtatatttatttaacagcaaggtaagtccagcagtaagaatcatgtgcaactgaagatctgatccatttgctaactttaaaatcttctcggacaattcctcttttagttttatgttaacatttgataaattcacctgtttgtttgatgtccggtaatcataagggaaatggcagtcagccagttcccctgataagttttctaaccaaaattctctttcctttattcgttcatttgcggcaattactttatctttatttgctattcgttcaaccatagttactcactcctgacaataatcaattaaaagttaaaatccccaaaatctactgataccttaactggttgcagttcttgaatttcttgtttaaatgaaatatcttttaataaaatttcaggatgatctacaatttgttcaaaaatctcaacataacgctcacataacttttgaaccgtgtccctagtatataaagaggttgcatattccatagtcagttcaattgtatcttccaattcaaccactcttagcaataaatccatttgtgcgcgcttaaagtcgtgatcatatgtccttagttctaaaccatcgataaacatatgatctgcatccatattttgcataacaaatgaaacatcgaaaagtgggttcctattatacgtgccctgaagtcctaatttattaaccaggtcctcatattgacatttttgatgttcaaatgcttgtaagacctgctcttttacttcaaataggaattgagtaaacctttgttcagctcttggatagttccttattcctaacatgtttacaaatactcctataatatcttgtaaatccgcatgcgggcgaccagtaattggtgaaccaataacaacatcctcttggccagtatatttacctagcaaaatattatatacagagagcatcagcgtatataatgtagtttcttcttttgctaataaacgcttaattttcttggtaacatttgaatcaatagtaaaggatattttactacctttcagatctaatatttcaggtcttgtataatcagtaggcatattcaagacaggtacaccatctttaaattgctctagccaatactgttcatgtttgagagcaatttctttttctttttcactttgctgccattctgagtaatccttatactgtatttttaagtttggtaatttctctcctgagtaaagcgcaaatagatctctaacaaaaatatcataggaaactccatcggttactatatgatgtaaatcaataattaaaatatgtttttgttcttccaatctaattaaccctacacggaaatatggagcattattaaaattaaatgggcgaataaattcattaattatttgttccacttcagattcaaagccctcaatttgagtaatatggaaatcagcatgatcatgaataatttgtactggtttatcatttttcatttcaatagtagttctaaatatctcatgacgcttaattaattgagtgaacgccttttctaaacgttcaatgtttaattttccattcaaaagaataacggaagtatcattataagctgtactttctggatacaatcggtgtaatacataaaatctcttctgagctgaagaaagctgataatgagatttaggttcagctggaacaataacatcaaattcactcttatctgcccttgaaatataatttgctagtttctcaatatttgatagagtaaagagctctttaataggaacttcaacattaaactctttatgaatttttgaaacaatagtaatagccttaagtgaatctccacctagttccagaagatcatcatgaacaccaacttctgaaactttaaatatatttctccaaatttttgaaagcttttcttctacctcattgcgaggtgctacatattcagtcaagagttgtggtctagaatggtataacgtagaatctaattcttcttccttctcatcattgaaagaatttaataacacccattgatcaatacgcgcttgcagttctcctggagaatgaatcagtacttccccttgtttccatgacagtgctatattaaaggcctgaactccttcttcaggtgtcatagataattcatgtacacttgcacctatttgcatatctttttcttcatcttcccagtatttccaatcactccaattgacacttatccaaggtagtttggaataacgatttatatattgtgcaaaaacatccatgtatatatttgaagcagcgtatgaaacataacctaatccacctaagaccgctgaaattgaagacattagaacacaaaaatctaagtctttatttcgtaagcactcttctaaattgagaagaccataaatttttgcagaaaattgttcctcacagtcctctttttcaagttcctgaatcaaattaaaagtctttccaccgagaatacctgcaccatgaattacaccattaatctttccaaatttttgttctgccttatgaattgcttcgtatagttgtgattgatctgtaacatcagcagcaagtacataaactttagatcccgtttcttctatctctaaaactttacgaattctgtccgaatacatcgtattttccttcaaatgcatatcccactcatcacgatttggcagacctgtacgtgtaagaagaactaagttggcttgtacagtttgagccaagtgtttcgcaagaattgtaccaatacctccgagtcctcctgtaataaggtaaactccattttttcgtaaaggcagtttctctttagctggctgttctagttgtaaaggctcgtaagtttgaacaaatcttttatttcctcgataagcaatcatcttatcattcgtatttgaaagacattcttctactaattgatttattaacctattcttccattctttgtttagaggtaaaacaacatcaacacttgaacaagaaagataagaatactcttgcggaacaactaatgacgttccaagtacagttgatttttctggaattaattcttcatcaccaatcacttgttgaacaccatttgtaatgattcgaattgagattgaatcagagatattcttgtctcctagtgcctgagttaagtagaacattgaatagaatcctaagttttgtttacaatttacatattcaattgaggcttgtctttcctcattggtaattccccacatatgaattattcttgtaggtaaaccatatatttcttgtacttcatccaataacttaacgtaatctgtacgttcttcaggatttataatgaagcgatcgttattctccttattaaaagcaaagccaggttctactgtaactactctctgccctttatttaataagtccttaactagttcattacctaaaccttcttgatctacaaaaacaatccatgtctcattcacatcatgatttggttcaaacaatgtagaacttttccattgcggcgtatagaaccattcagaaatgttgttattcttactaattttagattgcttactattaagcttttgacctaaatcatacggattaccttgtaatttataagatattttattgaaagaatacattggtaatgggatacgtcttctcttctcatctttataaaattgttcccaatctacagaaatacctgttacccacattcgagtgatgtgactgaataagaaatacatatctgatacatcttgttgaacagatcgaaccgtattaaatattctttcattaccattttcatagtctaaaaggcgactagtaagcctactaaggtcatttccaggaccaatctctatgaatagacttgtattgtccctattcaactcttgaattccatcagagaatcgaacagttccacgcatatgttttacccaataaactgggtttgttgcttcttcaggtcgtatccaagtaccggtcaagtttgacaaataaggtattttgggttctctaagtgtcaatgtactaacataggaagcatactcgtccagaattgaatccagttcgtgtgaatgtgctgctccttctattgttactcgcatacacattaaacgctttttctttaattcattttcaaaatctacaattgcttcttctgtcccagaaactatacaagcagggccattaactaccgctaaagaaatggtatgttgatattctttttcaaaagaattaatcaaatgaattaattcctcttctggaagtggaacgctaagcattactcctgcaggaagactactcattagctgacctctttttacaaccaatttaagtgcatcttctaaagtaaatacttctgctaaacaagcagccacatattcaccaaatgaatatccaatcattgcttcaggtttaattccccaacccattaatagtttcgcaactgcgtattcaaacgcgaaaagaattggttgactaaattccattctttttaatttttccgtcgcctcatcaatactgaaagtagttgggtataacacttctttcatgtttacattcgtaacagattgaaggattgcaaagcattcatccatagcttcacggaaaattgcctcttgttcgtataattctaaccccatgtttacatattgcgatccgttcccagaaaacaggaagttgattttaggatgttcctcttttacatttgcatattgtactcttcttccgtctggctggtttaattgttcaattccttcttgagtactggaacaaactaaagctctcctatgcttgaattccttacgtccaatttgcaatgtataactagcgtctgccaaattcaaatgaggattctgttcaaggtgatttcctaaattcaaagtcatacgatccaaagcatctttcgattttgccgaaatcattaacatctggtatggtctactatttgaggttgcttcaagctttggtgcctcctccaaaataatatgtgcatttgtaccaccaataccaaatgaactaacacctgcacgtaatggtttattatcctctttccactcatttaattgttgatttacataaaaaggtgtattttcaaatccaatttgcgtgtttggttttgtgaaattcacacttggcggaagaacctgatctttcatcgcaaagaccgttttaattagaccagcaacaccagacgctgcatttagatggcctacatttgctttaacagatccaattggtacagattgtttttcattagagttaaacacttcactaagcgccttgatctcaatggtatctcctagtttagtagcagttccgtgtgtttcaatataggaaatggactcaggttctacatttgcttcatgttgcgccattttaataacttctacttggccctctacactaggtgcagtgtaaccaattttccgattcccatcattattaatcgccgttccttttattactgcatgtatagtatccccatcatttatagcttcctgtaaaggcttcagaacaacaatcccaacaccgtctccaaaaagcattccatttgcattttcatcaaaaggacgacaatgaccatctgaagaaaatagcattccttcttggtaggtataacctgctttttcaggttgagttaatgtaattcctccagctatagcaatatcacaatgcccctgtaataatgcttggcttgcattatgaatagccaccaatgatgttgaacatcccgtaaagatattcatacttggtcctttaaggttaaatttgtaagaaatttgagtactaagcgagtctttgtcgttaagtaatgaaattaaaaattgcccagctggttcatttgcctctgatagagtagataacacttgccaatataagttaggagatgccccactatatacaccaattaggcccgggtaggtctcaatattatatccagcatgttcaagggcagaccacgcacattcatggaatactcgtagttgtggatccattaatgatgcatcttgaggtgtataatcaaagaatggagcatcaaaattatcagtaccctccaaataccctttcgctttaacataattagggctttttacttccataggattcacaccagattcaattaactcttcatctgtaaaaaattgaatagactctgtaccagactttatattattccagaattcatttacattctgtgctccaggaaaacgtccatctattcctataattgcaatatcgttatcttctttcgtttttcgattaaaacgttttgtatgtttaacttgattcttttgcttatctccacttaagtatctcgctaaagaacgaatacttggatactcaaacataactccaattgaaatctgtttttctaatctattaattaatctctcatgaatttgaattatatgaagtgaagttgcaccaagatcaaagaaattttcatttacatttacagtatcaacactgtaaaactctttccaaatccctataattatttcctctacttcatcttgatttctgaacttatctcccgttttcgtttgagtttgagtttccaatccagaaattcgtttacgagaattcagattaatccattgatcaaaacgtttatttaaatctcctgaagaaataattacctgatttaaaccacttaaaccaagcacacattggaatgttttttgtccttcctcagatgtcatttcaagcgcttctatactttgagcattgaatattttattaacctgttgagctcccgtgtactgccaatctccccagttaatactggtccatcgattattagatgtattactcactttgtctgaaaaactatctaagtaaaggtttgctgctgaataggctacaaaacctaatccacccaaaataggtgaaagtgatgaaacaagataacaaaaatcaagatcataattactcaataacttatcaagaactagcacaccatgtactttaggaagaaattgctcttcacattcaatcctacttatcttttccattggacactgagctgatttaacacgtaagacacctgctgcatgaattactccatttatgtgaccaaaattagcctcggcctgatgaatcacgtttctcatctgctcttcatcagcaacatctgcaacagctgtcattacttttgctcccaatgactccaacttctgaatatggttaatacgttgacataattgttcattttcaatctgctcgtgaagaatctgatcccattcttcacgatcaggaagagctgttctactaactaatattagtttagcctttactgtacgcgccaaatattctgctaatttaaggcctactcctcccattccaccagtaattaaataaaccccttccgatcgaatattcggaatttttgaagctaattcattttcatttattactagcatttcacttactttttcatcaggtataggctcatagattcgaatgtaacgagtgttatttcgaattgctattacagtgtcaataatgtccgtttgaatttcaaaatataagtttgatattaatgcttcttcattatcagacaacataaaatctacactacggcatctaatatttggatactcttgcggaaatacttttataggagccaaaagagtagatttttctgcaataatagactcgtctcctactaccttttgcatattattcgtcataacatttatattgataggataaagtaaattaaatttactaattgtctttgcaagtgatattaatgaatagaatccagtatctaaggtctcgatacctaaatccttattatcgacattccataggtgaacaatctcctctggtaaacattcttgtttttgtagctcattaaataactgataataatcttcttgttcagtagggcatattgtaaattcatttaaactaatctttttatatgaaggacccacaccgactgttataacacgatgtccatctctttcaagtttttctttaagagctaagcctatatgctcattgtctaaaaataacaaccaacttttagtagatcctttagttacatctacaatttctttttccatccaccctggagtatagaaccactcagctatattagaacgtttctttatcgatgtttcttcattattagttatattttgctgttcagctggatctatccaatatcgctttttctcaaaaggatatgttggtaaggcaatacgtaatctatattcctcttcatacagtttactccaattaatttctacccctagctcccacgcttgtcccaatacctctaacaagtcgtttcgtaaaataatctgattattattaatttcagaatttaataactctccaatatgtacaataacagaattaggatttacatccttaacttgtgttagaagttctactttttctccatgcatccattctgtctgtaactctgtatagttctcaactaattgattcaggacatcttctggcttaagagatttattataaatatctgaaaccattccagctaggcctgtatcaataatgttagaaggacgtacatcacattcaattaatacatcaataatcgattgcaagcagacgaagaaggttaaatcttcaaccaagctatcatctgttcctttaaagaatgcttctttcaatgcttttccagtatacatttgggcatcagtcatattacgctcaaatacttgtaaaaataatggttccttttggtatagttcttttacattctcaataattgatgagtattcgctaggtaacacaaataccaaatctggattttcttgtattttcacgtgaaaatctttaactgtttttaaattgtctatggcgctatctatatccttacataagaccgctcttctatacggaaatggtcgacggccagtttgcaatgtgtatgctacatctgctaattcaacatctttattagattccagatattgaaccaaatttactgtagcattatttaaagcttcttttgatctagcagaaagaaccattaactttttctctctagtagaagcagaacttttaactttaggcgcttcttctaatacaatatgaacgttagttccaccatatccaaaagcactcacacctgctcgaaggagatcattatcttcactttgccaattcaccaaatcagtattgatataaaatgggctatctataaaatcaattttcgagttagggcgcttcacatttaaagttggcgggagttgtttatgcctcatagataaaactgtctttataagtcccgtcacccctgcagctgtatctaaatgacctacattactcttaacagaaccaattgcacaaaaagatttcttgtccacatcttgaaacgctctctttagagcctctacttcgatagaatcccctaatggcgttgccgtcccatgcgtttctatataactaattgtagaaggatcaacttcagcaaaactatgagctgcttgaattacttcagcctgtccctcaacactcggagcagtatagcctacttttcgactaccatcattatttgctgctgatcccttaattacaccatatatcgtatctccatcagcaatcgcatcttctaatctctttagtattaccatacctacaccatcactaaaaactgcaccctgggcttctgcatcaaaagtacgcactttaccatcaggtgaacttgtcattccttcatggtatttataaccattctttttaggatacgttatagatactccacctgcagctgcaatagagcattctccagttaacaatgatctacatgcaagatgaatgctcaaaagagatgtagagcatgctgtatataatgtaaaactcggtcccttaagtcccagcttataggatgtaagcgttgaaattgcatctttataggaaagagtacctgcctctgaaaactcaaccacactatcactgtttaataatggcgtgtgcttcatccaattaaaattagtagatgctcctacatataaccctattaatccttcataatcaaatggattatagcctgccatctctaatgcttcccatgtcgtttcctgtaacatacggatttggggatccattattttcgcttccctaggtgtataagcaaaaaaggattcatcaaaatattctacttcctccaaatacccttttgctttcacaaaattaggatgttgtaaaacatctaaattaacaccttctttaattaactcatcttcagtaaatgtagaaattgaatcaacaccattttttaggttatcccagaattggtttatttcatttgcacctggaaatttacctgccattccaataatcgctatttccaaaccagttttactatcatcttgatgcttcattttcactttcctcctattttgtttaattcggattttctatgctttacatactcttagctacaatatttagagctaatacttctatttcataaacttaagcaaaagaaaaaacacatgaaattacccataaagtagctaaagtgatttacatatctgacagaaaacaaaaaattttaattacgatttctattcctggatttcaatgatattttgagcactcatttttattctaaaaacctaatactttggtaataattctgttaatattacactttatgtagttagtaacatattcacaagaagttttctttaagaaattaatttgtagagtaataattttgtaggggttttatgttattaaattaagcatactttttccaatatcatatagaaaaaaacaaaaaagtgacatacagtgaatattgagaaataaaattcatttattccatatctaaccaaaatagaacgaattttcaattttaaattagattttcttgcatttataattgcattctctataaatcatctatgttgagcttttaaacgttaaacatcaatgaagttatatgcgaaattttttattttagatgaggatctatacgtgaattcattcaagaggaattacatatactacagatttaatattcttcataaagttatatacataaactaaattccttcaaacgttttaagaaaatattgaggatgaacatcgttagtggaacgcttcctaccgaaggcaaacttatttctaggattgctgacttacaattttgcattgtactactcctaagacagaccaaataagttcatatgctacagtactgtttatccttccgttcatgttgttgattttctgttatgttttgatatgtacagacaatatttttatcttatacccatagctattgtcctacagacactttatattatcttcaaacccactatttcacgaaactgtaaaactaaaaccactaaatttccgaataaactgaaaacttatgagaaattgacaagaaatctcaataagatcttttcaatatatcttaacttcaaacgtatggaatcaggactcaataatgatgctatacagggaaatattctactaaatagaattactaaaagagatatctatagagagctcggatgttaaagaggctactttagattttgttgaagaaatatcacaaaatgtagagcaaggtgcagctgtaaaaccctctcttcttagacgagtaaaagcggctttaactgatattaactcaatggttgctcattactcccaagttgcagctaagattagccaattcattagcataatttgaaatatcactttttgggaaaattcaactacaaaattaaaattatttttacaattcgcaaaaaccgtcgttaaataaccaaataaaaatccagtgatatcagtatgtttgcttaacattactaggttctatgattttaacattttgtatattttgaaaagctcgttttgatatgtcgaatagcttcgtatattaaaaaaattaatattcataaaaataaatattaatttatatgtttttataaacatattgaatttatgatttttttactacgggaggaagaattaaaatggaacatattaatttagtatctttagttaatgctaaaagtaaaataatggatgggaagcgatatattatacaccaagtcggcataagacttatcattatgaattttatcaaaattcgcaagataaaagtgcacataaggttattggacaggaatttgataatgtaattgttgtaatagattctcattttatctattataaaaatctattaacaagtaagaaggattactattatgataatataaaaatgctctatcagatggtaacaagggctagaaaaaaactgcacattgttatcattgataatgaggaaatcttagagaaatgtttaaatattttaaaatctaatagacaggtttcaggccaagataaaaagggatttttaaagaaatatctagaaattctagaatctaatggagaaattacagaccaaaaaattgaaggaaatcatgaacagcaaactttaacatgaaagaaacgatttttatatgctaacagcattttaatgaaaaatattaaaacataatttgaaaatcaataaaactcccataatgaacacaatataaaatataagagccttgttacatttttgtagtaaggctctttacagttttgcatgtttttaaatattttatgcagtaatagcaagagaatctaataattgttttatcatcaatgagtattcttgatccttattagtaaatgattttagatcatctaatatcatttttcttaacatatcgtcctcagtattctcatattgccaaattaagggttggattttttttattaaatcacttctatgttcgattaattcaattcgatcaagctttaactgtttgatagttttatatgcacttctacattcaggttttgcaaaaggaatgggtccttgaaatattatttgattttcgggggaatcaatatatggattaagtaacggtaaagtatcatcataataattactcttactctgattacattttgcacatccaattgtaagattatcccacgaaaatgttttttgagggaagatacttttaggtattatatgctcaatatctccataatctatatgaagtatcttactttcacagtatgcacatttagaatatgtttcttttaataatgcttccttgatttcttcgtgacgatatctacctttaatataattaggtactttttcaccagattcttcaaaacttaacaattcatttgtccaattgatttctttctccaccaggattgtcggtttggacgattttattaaagaaatcattagtagatacctccttgaaggattcctaatgcctgaggcaaatgatctctcaatccaactgtagcaagttcatcttttagtctactataactttcaggtgtaatttcgtatcctttaaaactctttaaaatctcttctaatttgttctctacccatagtggcattgttatagggacacctaatacatctcttaagatttctgaagcattcgacgccttattttcgaagtctaataactcgctaactactaaatgattttcattatattttagcacaaagatggaagaatctcttacagagtttaccattaaagggctatgtgtagaaattatgaattgtgcattaggaaaggcttgaagtaaactcggcattaatcttctctgcattgaagcatgtaaatgattttccgcctcatcaattaatacaatatatggctcgtatttatctccatcatacatatagatttgccatgctaaatctaatattgcacctataccgccagaaacagcatctaataagaaatccccactatttgtttctaataccacttcaccatctctaattgaaatctttttaaaacccaatgttggtggaagaagtacttttagtatttcgataaatcctaaaaataaatctaatgcttctttattttcattaacatgcgaattaccttcaccaaatagagctaaacttataagtgttgatttcatttgaaaggaaggggaatctccataactttcaaataatttattcattaaagagtggttaaataagctaaaagcttcttctctagaagcaggtcttacaggaatgtttccaactggtttataagaatacgctattctatgagaaggaatattgataccttttaaatctaaagaattattagtatagtaattgagaccaggagtttcataatttatacaataatttgctgaaggagttaaatctggaacaaataggtttgcagtcttaccattaaaacactctaaactcccaatatttatcttatcttgttgctctctaggttgaatttttcttctaccaccacttttatatttcaaagatgtagtagattctttcgatggtatagccgtttcattatagccccagccaagctgtgtgctaaacattcttagaattgtacttttacccgcaccatttgcgccagtcaagaccgttaacctaggatgaaaatcaatatcaactctttcaaattggttccaatcctttatttgcagattttttagtatcatttgtatcatttcctttttttgtaattccttcttctactttacaatcataatactttttgaagaaagttggttttcattttctatttcataacaaattattgataattatattataatccaaatggaaaggaattttaagaaatatagcaattttaaagtgatttcgaatccttgaatcataccatttggctaaactaatttaaattcggcattttgagataatttaactaaaaggagtcaccatacatgcccatcaacttaagaatttgcactacccccaagtgtcaaaaaacgttattcgaaaatgtacatatttattcaagcgttaatgtacatatttaagttagcatttataatctggaacacattaaacaaaaataccaagaggaaatatatatattagaaagcctttcaaaagatatagagatagatttcagcaaaatctctcatgaggcaatcggtaagatcctaacttgtgtggactttttagatacgaatcaaacattaagttggagggacatagaatccacggatacgattgttatcttcttactttccatgaacctattacatataaatctatcttgcttttacccgtgtcaatttcattacttacattactttaaaaggatgcattcgctttcgagtaatgtaacacagtattctcccgtgtacttggatcaagagaatatttatgaattagaccatgaagaagaatttgtggaattgggaacggacatgatcgaagagatgggcttagaagtctttcctattgaagaagaagagtatgaaacgctctctacactattcgacataccattaaatgaaataaagaaagtagcagaggaaacatggggtgctatagctgaaacaatagatggcatatcaccgaatcataaagaaaaaatatctaaattactagattgttatccggtgcagtattcttaccaaattgatgaagaatctctttatctctattatggcgaggaacctttatacggaccatataaatttgagatgttactagatttattggaaacaatctttaagcagggggaaacaacacatgaagacagtagcaatatttgatgctttagagccaaaaggaattgtaaccatccagcaatttaacaacgaattatcgcgtggagaaactgccgttacttttaaagatttttatttagctttaaaagaagtgatggagcaaggtacacaagataatacacattactctagtggcgtactcccaaaaggttgtataaaacacgaggtgttatctaagagtggtgataaacaagctgtttggattgaagtaccaaaggctcagtgggatattcatttttttgaacggccgtttcaacaagtaggctttccacgtctattatttcgttatacggtgtatcaaaaacgagttacgaatatctctgtctttgctgtaaaagaagatatggagttagaagaaggaatgaaattatatcaatttccttactctaatgttcatgctagtggatctgtatgtacgggtagagttgtaatacctgaattccggactttaaaagatctagaaacatttcacgttctattctttgcaagttcattcaaccatgaccttacatatactcatacggaaccagtaggagagttatttaaacgatttgaaaaccaaaggtttgatgattctattctaatagaatcggaaattactttttaataaatagcaggattatatataagcaaacatactaggaggatttttaatatgaataacttattcgatttttttgatatggaaaaacaaatagaggaaacaacagtaccagtgaaaaaagctgcttcagagcaagccactgctaaaaaagtagagaaaaaggaaaaagcaaaagataagacaaagaatagtaagaaagctaaggctgcaaaagctacagattgtctagataaaatcaatacaacaacggttgttcgtcacgtggtatttggagatatatcgttagtagattggtttacagaggaagaaattacacatggaatcgctgttcaaaatggagattctacagatgtaaggaaaatagaagcagaggacattcgcgtaaaattagagcaacgttatccctcatttgttaaaggcttaactgtcattaaatttgatgaggatacaaatgcactacttccgattttaactgtcggcgcaaaaggagcaagtactgtagagggacaatccatttcagattgtcctttttcttttttaagtacttggcgtgatcactttttacctggggatttcattccgaggaccctattaatggactttattattattgcacaggccatttctcgtaaatgtgattgcgaattgcatgctgatatctatttcaataaagagcgtggttattttatggactttccacgacagcaggtagcaactgaaattgtaatcccagaaacgaatatagagatgcagtctatcgctatgaaggttatggagatacacagtcatcattgtttctctgctgaaccaagtgatttagatgatcaaagtgaacgggctcctattctttatgcaattatcggcagaatagaagctgttttccctgaactgcgtgtacgcacttgtctagatggggaattttattctattaaccctaactttatatttgcaggagaatatgcagcgaaagggataagccaaaattacgatttaagtaggattacacttttaaaataaatatacaagggggcgtaaaagagacatattttaatgtctctttctttattatgacaacattaaaaacaattcacatttcaatgtttacaaagataaaaaattacatgttagttcttaaacaaaatgaacgtgttttagaggaaccaattcatgattataaactatttcaatttatgtgccagttagagatgaataacatacataaagtattagaaggacacggaaaagatacccatattgatataaacatgcatcaagaatatatagatacgcttgttgtgcagttgaatttacttcaatatgttttagacattgtacaagaggaaggagtcgtccatgctgcatcgatactattgaagcattcatttgacttgtataccgtgcatcggattacaaatttatcgattccatttctacgaaatttagagaatacactatcaaaagaaaaatagggggctataaaaatgagtattgttattgatattgcagaaggaaagaagattgtaccgcatattgtattagtaggtgctggaggaaatggtggattaattttacagcatattgctcaaatgatgagtattttccaattaaacggtgaaatagtagttgccgatccagatatcatagaaactaaaaaccttggaaatcaactctttattcgacctgatgttggtaaatacaaagcagaggtactggctcttcgatataaagcgggctataacgttcctatctcttcctatacgtcacaatacatagaagacatagaaacaatgcaacagttgtttggcaataaatatgatttattaaagaaacaacataaagacgactacttgtatctgccaattgtgattggagcagtagataatatgttttctcgtgaagtcttccatcaatcggataatcttatttacatcgatgtagggaatacagctgtaacagttcctaataattggagagaagtagataaaaggcattggacacctcaacaaatggccgattataaaagcagtggttataacggtcaagcagtatgtgggattaaactgaatggtgaggtcattctttctccgattggcgacttatttccagatgcttttacaaaaaaagagacagcaccaagtcaattaagttgttccgaattagctgcttcagaaccacagcgtgttattacaaataagttcgctgccatgactgttgcacaattcattaacgaactctttgatgaaggtaccgtatcaaatcactatatcatttttcaagctcaaaaggcgtttatgaaagctgcaccaattggtgagtaatgatataggaggggacaaagtgagagtgtatcaattagattccactcaattacaatgtacattaacaccaacaaacatgtgtgatggtgttctacaatactaccaatataaacagtataccgttgtatctgtactggatttatcaaagcatgattccgaaatgataccattgcttctggcttgtctagcagaggctctgattcatttctatccggattcttttttagctaaggataaatctgatctcttatattggtgtagaaagaacttcaaaggatttcatagtatttctgatgatggattcttgcgagacttcaagcaggtatacgaatgttatcaagcattgcaaaacgttggaaaacaagaaaacaataaaaaaaaatatatataatagcagggagaagagaaacgcatgtataatatacttaaacgtcaatttaattacattatccgaggggtgattcggattaacgaagaggtacaaagggaattggacctattggtgcaaaagattcgtgaaactgtatcttctgtccaaaaaatcatcctttttggctctcatgcatatggcacaccaaatgaagacagtgattttgatctctgtattgttgtggaaggtgtaggagaaagaaaaagggaagtcattaatcgtatcaattgggggatttacgatgtaatggaaacgccagttgatattttagtgtatgggccagaagagtttcaagaacgtgctagccgtactgtaactatggaacataagattgcactagaagggacggtcctatatgagaaatattgaggatctaaaagagtgggtattcatagcaaaatccgatttagattctgctatttacttatctgatatgaaacctttccccactgcaattatttgttatcatagtcaacaatgtgtggagaaactcctaaaaggatttcttgcactaaacggtagaccagtccctaaaactcataaccttttaatgctgcataaattttgttgtagattagatgaggagttctcattgattttagaacaatgcgtgcagctgaatggttatgctacagacattcgttatccttattttgaagcccttactgtgcaagatgggttaatagctatacaacatgctcaaaaagtaattcgtttttataaagagaccttaaacaagctaaatataaatgaaatcgtaatcgattaaatatagaggaaatacataaaagagagtgcctttaagggactctctttttctatctcaaaaaaaggaggaatgccccatacataaaaaatagaatcttatttttctatggggataaaaataaaatgatggatatatataaagaaattaaagaggaaatgaaaaaagtctatttatctcgcgattgttgttttgtaggttacagcgggggaaaagatagttctgctatgttgacattgctatgggatgcgatttccgagctgtcgctagaagatcgtacaaaacctattcatgtattaacttccgaggttggggtagaaacacctgttatgactgcttatatctcacgtacattaaagaaaatccaaaagagtgcggataagcaaaaccttccgtttatagtacacagtgtgagaccattaatgaaagattcatattggtataaactactaggtagaggtgttcttccaccaacaggaaatagtagactacgatggtgtactgattcccttaaagttaaacccatgcaacgtaagatgaaggaaatactaatagattcccaaactaaaaaagtagtagactgctttgaagagtatgatggagtccttgcgttggccgttcgtaacgaagaaagcgcacgtagaagacatagtattcaaaaatatgcagtaagtaatgaatctttattttcacgtcacaatgacatgaaaaatatactctgctttaatccagtcaaattcttaaccggtgatgaagtatggatgttgcttttagatagagggatactgccttttggtgtggacgttgaagaaatgagtatacaatacggacaagctatgtttgaatgcggcataaaaacaggcggaaaacaacaaggaaatgcttgtggagctgcaaattcgcgtagtggctgttggacttgccttatgatgaatggtgaggataaaatgctaacccaactaataagcgaaggatatacagattatgcttatctacaatcatggaaaagcttcttacgctccattagaaacgatattcgttatcggaatgtaatgaataggcgaagtctgcaaacactccttaaaaacgaaaataaaggggattcggacttgttttcaattcaaaatcatgctgaatatgattatattatgtttgatcgcacagaaaaaggagactatgcaccaggagggcttacggtagaaggtagaagaatgcttttagagtatctactttttacacaacaaaagatgaatacaaatcttatttctgaagaagaaattgaggcagtgctgcaagcctggtatgaaacggatggaattagagtataccgagatgaattggaacctatacaccacgcatatctaggtgaattggtgttcaaacccgattgtacaataaatgaggaaaaaacaacgtctccatttcccgtattttttgtagaaatagatattcatctagggaagcaggaactatttcgttggattaaagagcggcaaagaattacacaacaaagctttttcttctttccttcaaattattcaaatgaagttgcaaagttaacatggaacaagctaacctttgttgtatctagagtagatgtaacagaagcaagagacgctgaacgaattgttcgtcattggttaggaatggatatgtaccatggaaagaagaacgaacaacataaacaaatgctaattcagctattaattcaatccatgaagaatgaacaattgtttaaagaagatgaaaaagctagtacgaagcttttgtatgctgcagagtttacaaatagactgtctagattaatagaaacagaggaaatactatccgaagagacaaaccatctctttgcaaaagtacttaaggaattaggaaacgaggcatttctaatagattaataaatattagaaaaataaattaataaaagacgtgttctataaatagaatacgtctttttattttagtgtgattaatacattcaaggtaagctcatttttgatatattatgtgttatgtattgtattaggaatctttttcttgattctcattttcaatattttttaatgctacatgtttggatttatttttgaaatctaaataactaatataagagagtagttcctcttcgaataatagaatatcttcgcattttccgtacaatttatgagccaactgtgtaacaactgctttttcatgttccacgttatctaaaacctgatgattaaacaagtaatctgtactaaccaaaaaatagattgcaattttttttaccatatcaaagtttggctctttatttcctaactcccaggaagatattgcacttcctgttacccctaactcgatacctaatttgtgtagactaattccttttaatgttcttaaattcctaaggttctgcccaaaaatatttcctttcaatcaaatcaacctttcaaatttttaattgacaattagtatagagttgaaataaagttactatattttaaaaaaagtattcatcaaactttattctaagtctacttacaggtcactgtaaatattgataatatctttttaaagatattttagttttgaaccccatcctacttaccaaatctttttcagttactccttgcttaataagacggagaataaaagtgttcctcatctgctgcgcagaaatacgcctttttagtcccgctcgtttcacttcaagtcgtatcatcttttgtatagcaacttcagacaaagcttttggcatatccttttcgtatacccaacgatacgtacctcgattaaaatcaaatgccacaaatagaggattatctgtgtgttgtctaggtcttactggttccggaatagtcttgtaatatttataaagctgctgcgtatcttccatagttaaaaagacagacctagttgctccattctccccaggtaccattaagatatttctagcaaactttatatggctcatattaagcgatacaagctcatgcaaggacaacccatagtttactactaaatttataatacaaacgtttctatccataataagagggcgatatttagcttgtctttccgttaagcccttcgttgatagaacagtttgttttaaaagcttttcttccatttcagtaataaaatcattatcatttagtgattgatccggaattaaagagaaattaataccatccaatggactaactatacctaaaaacatgtgtaccttcttcaaaaccacccatattctgtgtcttgttttctgagaatatttacgcttgtcttctaactcagagaaatacgtctgatagtccgcttcagaaagttcacgccatgatttgatatgtagaagtttctcattttctcttagccacttataaaaatctttaatatcgtaagcataacgtttaatcgtggattgttttcgtcctttttctgttaaataagcagaaaaggctgctaatgtttcttctaaattaatgtttttgctcattataatcacctaatttcttaggaattattataacagaaaataagtgaaagacctgctaccgccctttgctacgcacggttgctgccatctccaaaacgcaaacggacaaacaaccctttgcgttttggagatgttgattattatctataaagtaaaataaacagggttatcataatactccaaaaaggaactacaaaaactaatccccaaaatattcctttgaaaaatctaatctcgttataggtatctatatctaagtaagtcgtatctttaagtacagtcatgtttaatcctccaaatatgaattgtttactaaaatgaaaaaaggacaaacctcgccctggtagggatacgtaggtttgtcctttagtatgtgggtaatgatatgtttattttccattattataacgtaatttacaaatattttcaatttggtcagacatcttattaacaatcatactagctgtattaaaaatctattataaatatatatcttatatattaaaaagaaataaagataaaactattataggtatcaaaaataggggaaagatctactcccacaagggaaaatttgatgttagaacgtaaaaaatcataaatagtagaaaatgtatacggaaattcaatgattattagactatcaattctacaaaaaagcataaagagaattatatatttctacatgaaatcggaaagaaattgatacaaatcactttatatttatccaactatggaaataggctttattttctttattttgttaaatacagcagtatctagcgttcaattacccacattttatccagattaagcttctaattgttaacattactcagtatatacacataactcacattattattgatgatttttattagataaatacaacgacactagtagttacaatgatatcaggaaaatattattcacattcaagtatatttttcctcatatccactatttttattatttttcttctgattttttgtaggtattatgagataggttttactactttaaaagaatactccctagcactatgtggagagttctataatgctagaagagaatttgtatagaagtgcataaaaaaagacctcattttacatgaagtccttctgattttgtatttataaatagagtagtagaaaaggagtatgaatgaaacaactacgaatagccctctaatttcgattttttcaaaaatagagagctcgttactattattttgtttccattgcgtgtagcacctgatctggagctgttattgttacatcggcacgtactaaacgttcgaaggtacgcataaactctagtaaattaaactgctttggtagctcaataacgcgaagtttttcttgtggcagcttatcaattgcctcgataaaccattcacgaacatcacttggaatcgtgcgttctttatggccacgaacttttagtttttcacgcatttcaatttctaaagcgatatatgcatggagattcactccctgatcatatgcatattttctaaataacgtttcttcctggtattttagataattacggtgataagactcttccgtcactggtaccgcaaacttctgcttcagtagtgcatgcacattcttaaacatcttcttaatgttgtgaagagagtacatagaataatgtaaaccgaaattaaagacagcttgctcacggtcactatttctctcttttggtatatgctgcgcaataagagggtagataccttcttttgctgctgtatcgagaatttgatattgagatgtttgatgcaataatttcttcaatgtatatacaattttcgttggatatccttcttttcgatcaaccatgtcacgtagtccgcgaatgacactgcgaatttgacggtgacaagtatgctttaagacatgaatgaatttattcatgtctgcagacagttcaccgatattcatctcttgtaggactgcttcgataaatttcgcttttcgagcataggtagcttttggtgtaaatggatccctatgttgttcttctccagcttctttcgaacataagaagtctgaatggatagacagatataatgtcgtatatcgttttgtatgctttacacctttttgcattttacaaattttgaataggggattccctgtacatggtaatgcagttgttaattcctcgataaccgcacggatttgatgcggatattttttatgtaagaaacaatacatcccaccgaagtgagttttgtttcctctttcatcctgcttatccaaagaacgctttaatgttgtttccgtatgttgttgcatcgcaatgtctaagaatagtttcttagctgctacagatagtttaaagaaagcctttgtaaatacaacaggactaatatatacgtatggatttgctttttctgtttcctcgtttataaaatgagtcagtttgattgtatatcggccatctaagccattttcaatagatataatgttatgtaagcttaactttttcaaagcgatatagaattgagaatgctgaatgtatgcaagctcttctttatattgcttgtaatcttcccacatcatatgtattgttacatttggaatgacaccatttgtatagcattttttatgtaagtacaagaatacttcaagatctgcattcgtaataccgtataatttatgttttcttccggttttttctgcaattgcagacattgcgcgacgtgaaaaagatggcttggctttttcgacaaagccttctacgtcagcaatacgttcttcgtatgtcatgtgctgcagaatatcttctaaatatgtatctttatagctgtagtatttctcctcaaatgtttccacaaacttttgccaagatttgagtgttactagcacagcattggttgtttccccatttaagctacgttgatttcgtattacaaatgatttccccatctttttcacctccgttctgcaaattcagaaatatatgccaaaagactataaaatattccaattttgattatatcaaaacgaattttgtaaaaacgtgccctttaagagagtttttaaaaagaggaaacacacgctaaccccttgagccacaaggcctcaaaaaaaagttacaaaaaattttatgtgcaacttttgtgaaaatgtgtttcctgtttcggtgctagaggaaacatggaaatcacaataaaccttgatttaatcatattttttactcattgttctttagttacgcgcacgacttgagaaaaatgtttcctgttttccgtttttttacgcgcgcgacttgggaaaaaaatagagtttatttatgttttgaaaaaacgaagatactatagaactattggtataaaaggttttttggcatgtttataaaaaagttacgcgcacgacttgggaaaagtgtttcttgttttgtgttttaagaaggaatatgtttccaaaaagtagtgtattttgttgcaggtgtttcctcttttttcgttatacgcgtaacttgggaaaagtgtttcctctgaaaaagaagaaacaatacaaattgaatctgaaaaattagcaaggtatgattaaatatacaggagaaaatattaagagaaatttttttaaaacatttataaggggaattgagaatggatcaaagaatagaagaagttaattataaactaatagacaatggtatatttttcagtgtgaataagactcaacttgcacgacactttctaaataatgttcttgaaatcgatgtatgtaatctaaacaaagaagaagttactaaaataatttgtgagaaatatggttataaattaaaacagttaccagatgaagaagaaatctatctatttgtagctcataacataatgggaattaaagaggataaagagccttatgaatgttttaaccatgaggtttttcttgtaatgaaggatttaagaaaaattaattttatgatccaagaatatgaatcaaaacagcaagttaaagatattgatagatatgaaaagaaaaagtatcaatacttagctgaaaagctttataaggcgaaagatgtgatatgtgaatatatgacaggagaaatcaattcatgtatatataaagaagtaaaagattggagtaaaccaaatggatttcctagctccggtagttttaatcaaatgttaccgagtcgatatgcttttagaggtagggaagaagaatatgaaatgtcagtttttgatggattgaattataaatttgaatttattacgttacaagagcgaaatgaattgaaacttctacacagtaataataaagatgaatttaatgaacgtgtggatagatatataattacacatgaaattgacaataaaatattatctcttatagaggaaaatcatgtacttaataagagaggaatgcttaaacaagcaatagaaatttataaagaagatatgatggaattattctgccagattatacctcttcaaattgaggggataatatatgattattgtattgagttaggggtttcttcagcaaatatagaacgtacctctttggatagaaaaatagaagagatagtaaaaaaagatagacggttcaaatgtcatgaatattttaagtatgattttattgagttaagaaatacagcagcgcatggaaggttgcacgagaatgttaatttcaaagatactgcaaatatgttaattttagatttaatgtatttatgtgatgctttaaataattctaatgcgctagtggttaacagaatgagaagccttataaagaggtttgaagaaaactttaataatgattatgtacctatagacgggatagtatactcgtttatagcaaaatacagagataagtcccttccatctatttatgagaaggaaaatgtaatacaagaaataaaaaaatatgctatgagcgataattttttgagatatatacatattcacataatgcatccttcgttggtatcagaattatcaccggaacagaaacaagaaataaaaaaaattatagtttatttaatgcgttcaaaagaaattaaagagcgatgtgtaaatttattgaaattattagcagataattcaaaagaagaattagtacataaataagtatgcgcaccatattaggtgaataggaggagaatatggatcagttaaaacaattgtttcaaagtacattattagtggcatacccactatttcaaaatatagaaaataacgaacgaatctttaataaatggagaggactttgtacgttaattaatagcgatgttagttatttagaggatcctatgtacacatctgtctcctttaaaaaatttgcaaattggatatcgtataaggaatcccaaggtgttggtattatggaaattgttgctcaaatagaaggataccgaccagaagtatttgaattacttgctaatgatatagaaaaagaatttgaaattcttttagtgaaacaaaaacaagaaaaaaaacatacagaggagcagcagagcttcatcgaacatagtagtgctggttttatgtaccatttaacagacacaattgcaaaaaataattttacagaagataaggaattgaatgcccatattgctgagctaccagataagagtaatagccttgttgtggtatcttcacgttttaatgatggtgatatgaaattaagaggcgcaggggagttaaatagatggaatacattagttgattctacttttgttgatcgtgtaatggatgatttaactgctgattgcttggatattgtaacagaaatatgggtgaagtcagcaagcacggaaagtagtccagtacatataggttacgaagaaatattagaaatgtgtagtatgaagcaggtgagaaatggtaagtcctattatcgtaaagaggaccgtttaaagattatggagcgtttagctgcactggcaagtatttttatatatgtaaacgaagataatgaaatagttatactaaatgatgatgagaatccaaatgagtcacttgcttataaaaagcaacgagtacgaagactattcgtaatggatgaaatagtatttgctaaagatattgataccgatgaaatgttaggtattgaaagtatgaatgttgcacctggaacatttttatctaagtatttatatggatcagaaaaattgactggtttgttatcgaaaaaggcccttgaatacaacagtaaacaacagcgatatcataaaagattgactaggtatttaagttggagatggcgaattcagcaagcttatcagcatttagtacacccttattcaatcggtggtccaaaaggtcttataagtgttatgggtgtaagcatgaatcaaaatcctgccagaataagaagtgtattcgaaaagacacttgatgacttaatgcgtgatgaagtcatcaaggaatggcaataccaaacaccgattgatgaggggaaatgttctgggcgtaactggcttgagaattattggttaaaccttaaagtaacggttacacctactgatgagttagtatcgttacagcaagagcttttacaaaagaaaaaaataactcctaagaataaattgatggaaacagtggtaaaagatccagtaatagaagtacaggatatggagatagaagaaattcaaacatctcaattagaacagcaacaggtaaatagggatattaattggtatcagcagaagattctccaatataaagaagaaaataagtgtagtttaagagatatggcaaaagaaatagagatatcaccatctaatctttcaaaattgttaataggcaaaagaaaaagattaagcgaagaaacacataataagttagataaatggattgagcgtcaagaggtagttaatctgctgtaaattatggttaaatataaatcaaaaaaagctgttggaaacaaacgaaaagtgtatgtttccaatagctttttttgattatacagttacacggattaaaaatagtatctttattaaaatcataatgcatttataaattcgtcaaatataattttcacctctttcttaacagaatcaaacacctgttataaagttgttaaaaaaatgcaaggtttattcaacaattgggcgagagaatatgggagttacataccttttaagtagattctgatctacctgtttaaaactaaaagtttcgagtaaagatatggttagttgttgtgtaaataaatggatatttaaatacaaatgaatatatattttatatttgataaacaaattaatttaattagtattttccttaataatagaatcaattgtactttgttttattacccctgatttttctgatttaagatgacaaaaatttttcaaagaaaaattaatattctccaatgcttttatcaaatcagatattttacttgattccttactaaacaattcttctaaaaaattttttttaaaaggcatccaaattaaaaagacagacataaaaattaaaaaacctaacattaatagatactgaatagcttctgctgatgtcttaatttcatgattataaacccagctattgaaagctgaccatactggaatcgtaaacaagaaaaataaagaaccatagctagacaaaagttttaatacatttaatttctcggtttcttcttttttttcctttaacacctgtattaaaaattgtaatgactcttcattgaatttaggatcattatttaaaagttctttcttaaataaatatgattgaacaattaaacaaataaaaacttgccattgtttgcttttaaacgagatattatatttattaacagaaatcaaaatagctggttttactacaacataatgcatacataccaaaaacaaaatcatataaacaaaaaagaaaatcatataaatatagaaagaatcaaattcaatatcatgttcgacaaagatgtttaaagaaataataactaaagcggctattgaaataaaagtagcaaccaaaaaaataatattttttaaaacatacttataaactaaattccatttacttaactttttcgaataaaaattaaataactccaattcaaaatcaaacatataattctccttactattaataattataccttttaataacattatcaccagttctactatcgatgtaaaaaatatagcaattaccatacccacttaaaaaacaatttaatatacaagaccttttgaatttttacgctgttcaaattcaaaaataaccatcggaaatctatgaaatattaaacctattttgaggataaattattcgaactgaatacatattaatgttatattagaataacataataaaaataacataaaataataaattcatgtacaaaactataaattaaaaaaattgataggatatatttctaaaacatataaagcacctaattaatctgttacctaaattctttaggggacaggtggtttgatttttcttgaattcgcacacaattttaggaatggatgtatactagtaccatctttcgcacagttttgtttggttttttgttatcttttgtgagtagaaaacttcactttttaaatgaccaaagcagcttgctataaaggcattatcatggcaatttcctctccggaatatactgataattatgtcgttttctttggcatacgcttgaaacttcttgctgtataaatacttccttgattcgattgtagaaggacatttttacttttgccctcttattgcttgttttgatgtcttcactgctaatgccagtgtttataattgcttgatgacttaactaataatttcacgattaaaggtatccataatcgttgataactaaaaggttacgctcaccaaataatagattagacatatccgtaaactatgtttcattttgtatggatgaatcgaattgacattccaatcgatgagggtctatccctggttccacaccattgatgtatttctttttttggcacacttttgaaagaatataattttgtctcataagtcttaatactttttatgattcacaaagccgaagagtaggagtcactcttcgatattcatatcgtaatttatgcctaagacagatgtcctagattttcttttttaccttatctataaaatattttgttcgttataaccaccgataaatgtggaacagggtaattctaatacgttacacaattcttttacagttatttttatgtttaaacagttccataaagtaacaacaaattccggtttcaactccttttaatttccagataatttccgtatataagtaattttgtttttaagtgtttattttctaagcgtatttgttccaattcatttaattcttttggcacttttctataagaatattgttttcctacagggcgactaaaacaatacgtttcaccttcacgatgccacttcatccaagttttaatctgtgcttaatttttaacttctaattgatccataatttctttgtttgtgtacctttgttttttcagctcgattgttttccagataatttcttctagataagattttctcattcccatacgaggtgttttttcatgtatctctattcggcttcactcatatcaaatacttaagtttttttaaaattcccgtagtctttttatattatatatctaaaaaattatatgatatttatccattaatattttttatgtaagaaaataatagggtatttaaaattctgtaaattataatttatagaattttggagtggttaatatagatttgtatacaaattagatactatttattcatttttaaatatgaaactgatattatcaagttttttacgcttatttggtatcttttttagatactagtgttataatggataacaaggagggaattaaatgaaaaaaatagtgggtgaaaacattaggatatacttagaggcgacaggacgaactcatcaatgggttatggataaaggcggaattccaaaggcgactttttataagctattaaaaggagagggcgatttaacaaaaggaatagaaaaaataaacgaattgtttggaataaaagatgatttttatttctataattcagaatttaaaccaccattaaaattagaagataaattaaaaagatctgatatacgaaattttgcagctgcaaattatgtagccgttgagggcgaagaaacagaattcaaaaatactttagatactttagacgatttcataagaatgattgaactattaaagccttataataatttaaatagaaatgattttatataatattttttatctaatacttaacattaaatatagcctataaatttttggagtatacaacgttgaattttatctacaaagggatgtgaagaagaatgataaatagcactaatatcagggaagttatagagcagaatcaaaaaatacttccttcaatattggtaaacgtagaaagtacaattgaaaagggaattcattttaaatataaaactatagaaagtatacgtaattatttaatgcagaaaacagaagtactacttttcccgagcaaatctttatcttatgggggaatggtgttatatcgaaatggctctttttatataaacataaatactttacaaccgaaaacatatgagaattttgtttgggcacatgaatactatcattttgaatttgaaaaggatcgaatcaaaaatgcggatgatgtaacttttgtgaataatccagtcctaaatgaaaatgagcgtagagcaaatctttttgctgcagagttgttaataaatgatgatgtattaaaaactttatttcaagaaataaaattaaattacgttaatgattctttggagaagaatgtaattaggttaattccagcttttgaattgccttataaaactatggtaattaaattagcacaagaaaacctgattagtatggaagatgcagagagaattattgatcatgattaccgccataatttaccacaagattttgatctttcaattttagaacctacaaaagcaattaagattgatggattaaataaattacttgaatcagaatccgttcaagaaaatatgcttgaatcagattttgaaagtattcaaaatctagcaaatcagcatttcaaacaactggaggctattcgaatggaaatttaaggaggaacaaataaatggaccaagtaaccaatacaccagagacgaaccaagattcaaaatgcaatggaatagaaccttatttacaagatggtaggaaaaatgatagggttacacactattatatattggataataatgtcctatcagatttagcaaagttggcaagagaagagcaaagttccttcaaggagttaatgacatgttacaaaggaacagtatttatagtaccggaaatggtaatggaagaggctattaggaatttacctggacaacagtgggttgatgagaaatatttgaacttttatcaggtaatgagtgaattacatattcccatttatcttgaatctgttgagcataattatcagatttttgcagagggttatggtagtaaggaggaagccttccttcagtataaagagatagccctaaattcaataagtaatattgctattcaaggtgaactaagagaggcaaaatcatgtaaggatattgaaaaagcttattcgcagtccttgaaagatgctggcgaacgatttatttttctttatgcgcatgcgatgttacaagataaagtaaataagatttctattttgagtaatgagataaaaggtgtctacaatgtttggaaagcaaatatgagaaaaggtgaattattggaacttgtcagagttactagtcatgaggaatattgtgaaaaactgcgacctgtatcatataattgtattctagtgaattccttgaaaaagaatccaacattaactagtgaacagaaaaagtcattattacaaattatgagggacagtaagataattggtagaaatgtttattattctcagaaatcatgcaatttagtagatactagggcagatatgaacaatgaggaatttataaactttattgaaaaacatgatgattataaattagcgttttaaattatgcaagttttgaagtgttctatacttttgtatgggacattttttggtttatctattttaaatagaagaatcttacttcgaaaataagaatggttccgttttaaactatgtatttggggaagatagggtgacctatattgctcatgttcgtgaaaataaaaattgagtataaactgcggaagtgctcttattaaaattagttaaattactacaagctttatttttaaataaaaatattcttaaaaaatgacttaactaaagtaatggttaggtctttttcgtatgcttattttataaataaataaggtttaattgagattagagtgaagattaatataaagttttggttttataaagtagagtagataatatataagtagaaggtaattggagagagggaaccaaattgtgtaaatgtagggtttgtgagacaaacaacaatgattttcattgcaatatagctggggataatatttgtagaaattgttgtaatgactttcaattaagaaactttaaagatagttggagtggtttagtaaagctagttaaggatgaaatggaaatttataacattagcgaatgttgcctaaaatgcaaggggttaatgagaaatcaaagggttgaattaacaggggacggatcgataataaattatggctacaatggcaaatatgtttttaatgatatggttgattcttactcgtataaatttttcaataagaaaaaaatagtattattagagtctatgaattcactagatataactggagtatatgatttggcggaaggatactatcttttagaagaatatgaaaaagcaatagatttattagaaaatttggaggggaaggacactgatagtaaagtgttgttactgctaggaaaggtgtattttcatgccaataacttacaagctgcaatagattgtttattaaattctataaaaatacatggggataattcagagacttatcgtatactgggagaggtatatcaagcagataataatcttataaatagtgcatattattttaatcaagcaatcaagtattttaaaatagacgcgtatgatagaccaaatgattattttccacagtattcatatcttggattagcagtagtatattctaagttgaatcagcataatgaagtaataaaatcagcggaaaaatttttagaatctcaatatagttgggataccttggtagaaatgctttatgagcaaagatccggtgaaaagaactatataggtttcggtggtttttttgcatgcgctactatatatgaattaatggcattgagttacttagagaaagagaatctaatgctagctgaaaaatatattgaccgtgctcaagaattaaatcctgaaaatacaaatattgcaacgaccaaagggataattataggtagaaagcataatgatgggaaaataagtgagtatagagagcaaattagttcattaagacagaatatagagttgagagctagtagtattaacaaactaaaaacgctaagaccagaagaacaagtcaaactgtttacgggaaatgaagaagaaagtgtgtggggtttcctggtagggaaaatatttgataatttaaagacaatcgagaatttatcaccaattgttacgccatctcagaataaagctgctgaagaggatagatatacggatttatttaaatcacatatggattctaatttagtagatacctttggttggattactcatactcagagtagaggtggatacacacggaaagagatgggagatagagggggaataggagaaagggatatagtaattcgttctcatcaaaataaagacttactaatgggtgaagctctaatattgaaagggaaagatactgcaagcataaaaacccatactaagaaaatttttggatatgatatagggaattgtaacttccacataattattaattggggttttagcgaaaagcctgattcagtctggaaagattatagaaaattagtaatttctcggcaagagggtatttatgcagtaattgaaaatggagaaacagagaatttatatccagggattaataaacaaggaataagaacattttacacgaaacattctacagatgttgagaatgaggttgctactgcgattcatgtgtacgttgatgtattaaaacaaatgaagcgtgaaggtgctgaattagcaaggaagaagtagaacgatgtgattagaagatttaataaataaaattcttcatcatattataaaactatacattcttgtttattagttagctaatagctatgaaaataaaattaaatatatcggtgtacaagaatgaattgatttagaaagtcctttgattttttaggtgcgaatgtatagcaaacatgaaattcctagtacattcgcacctagaattctcataatgtatgatggggatttatgatttttatacaaaatactttaataaataaaaatatttttatatttttgaatagaattaacgtatttgtgattgattttgagcacaaatcggtgtcgcacctcatataggtgcgtggattgaaatacaagatacgagaatttaatgacgtcacccacatgtcgcacctcatataggtgcgtggattgaaattattgttacacctttagagtatccgagtaaaaaagtcgcacctcatataggtgcgtggattgaaatacaatgggaaagtgttaggttatgcacgttttaaagtcgcacctcatataggtgcgtgaattgaaatgaagatagtagaagaaatcaaaaaaagtgtatgtcgcaccttaaataggtgtgtgaattgaaattttgttgctccagtcgttatgatcgtctttgcagtcgcactttatataggtgcgtggattgaaattaggagttattaatggctttagatgttagaccagtcgcaccttatataggtgtgaggattgaaattacctcgggtttatatttatctggaatgcccatagtcgcaccctatataggtgcgtggattgaaattttgcaactagctcaattgtttttccgttttcagtcgcacctcatataggtgcatggattgaaattacctcgggtttatatttatctggaacgctcatagtcgcaccttaaataggtgtgtggattgaaatataatatcacaattttgacaaaattcagtcatgattgcacctcatataggtgcttggattgaaatagtttagtagatactcaactagaagtatctatatctgcagtatctaatacaaaagtaaacagtataaaatggagggagattgaatgacctacattgctcatatacgcgagagtgacagtcaagtacaaacagtcgaagagcatttattaagagtaaaagaactagctgaaacctatggagaaaaaattggtataaaacatttagctggtttagccggtatgctccatgatatggggaaatacaccaatgagtttaaagaatatatattggaagcagtaaataatcctaattctccacctaaaaaggggagtgttgaccattcaactgcaggggggaaattgttatatcaattattccatacagaaaatatgattccttacaaagggataatatctgagatagtgggaaatgctattatttctcaccacggataccttcaagattttttaaatccagatttagaatcgccctatttaaatagagtgcgagataagcaattaagaggatttgatgttacacaacaattcttttttaaacatgtcatgaaagagaaagattttcatgagtatgtggacaaagctactgtagaactagaaagtttcctacttaaagaatccccagaaaatgctgaaaaacaattaatgtttttaactaaattcatctttagtacattaattgatgccgatagaacaaacacccgattatttgaagaagaaaaaagtgtagaatccgtaataaatgttgatgagttatttgagaaatactacgagagactcatgacaaaaatcaattctttcaaaaaacagcagaatgcaaatacccctattaacatgttgagagcagacatgtcagatcagtgtgatcagttcgctgagaggccatcaggaatatatacgttatctattccaactggtggtggtaaaacattagcaagcttaaggtatgcactaaaacatgcaaacacccataataaaaaacgaattatttatgttgtaccttttacaacaattatcgagcaaaatgcggaagaggttcgaagaatattagaggatgaagaaaatattttagaacatcattcaaatatagttgaagaagtgaatgagcatgatgaaaatgaagacggtgtggttagcatacaacaaaaattaaaattagctaaagataattgggattctcctattatttttacaaccatggttcagtttctaaatgtgttttacgcaaagggaaatagaaatactagaagactccataatttaagtgaggcaattattatttttgatgaagtgcaaaaagttcctgtttcatgtgtttcattatttaatcaagcattgaattttttaaaaatatatactcgttccagtatagtcctctgcactgctactcaacctgctttggactttgtagaacaaaaattagacataaatacggatgctgaaatgattaataaccttgatcatgtaattgaagcatttaaaagggtgaaaatcattgatcaagcaactaatgaaatctttaataaagataaactcaaaacatttatacatacaaaaatagaggaagtacaaagtatcctcattgttctaaatacaaaatcagttgtgagagatttatatacacaattacagagtcaaggattaaatatccctatttatcatttaagcacaacaatgtgtgcagcacatcgacataaaattttagaagaagttagagaatgtctcaaagaaggaagaaaaatcatttgcatcagcacacagttaatcgaagcaggtgtagatgtgagttttgagtgtgttgttcgttctttatcagggttagattatatagcacaagctgcaggaagatgtaatcgccacggggaaaagggcatacagaatgtctatgtgattgattatgaagaggaaaacttaagtcatttaaaggaaattaaaattggaaagaaaattacgaagaaaatccttatggatttaaaacataacgataaaatacatggaggacatattttatcaagagaggcaatgaagaggtattttaaagaatattatagagaatttgaatcagatttagattactttattccaaaactaaaaaagaacatgactgagttattatccgtaccaagaatagaaaatagctatcgtcgagcatatattcataaacatgataaaaaagatattccattatttattataaatagctaccagacagcggccaaacattttaacgtcattgatgatataaccacttcagttattgtcccatatgaagaaggaaaggatattatcgcagaattaaatagcaataattccattgaggatctgactcgattattacgaaaggcacagcagtatacagttaacgtattcaactatgaaaaagaaaaattgataataaatgatggactcgtatactatcttgatgggaaaattctagccttgaaggaaagtgcttaatgagagcgattttaagacagctatattttaaactctatctttgtttgagatagggtttttaatcgatgtttttataccacatcaaaagaattcttaaatttcatataatatataatcgccaaatattgatatagttacataggaggagtatcattaatttactagaaaaatatagaaaatgaaaatgaaaaaggaggaagaatctttgcggaattctattgaatttgaggtttttggtgattacgcacttttcacagatcctttgatgaaaatgggaggagaaaagttaacttaccaagtaccaacttatcaagctatcaaagggattgttgaatcaatctactggaagccaactcttcttatgattgtagataaaataagaattatgaatgcaatcaaaatggaatcaaaaggtattcgtccaattgaatatggtggtggaaatacactcgcaaattacacatatttaaagaatgtaagataccaagttcaggctcattttatctttaatcatcatcgacctgatttagcttttgatcgtaatgaatataagcatcataacatcctaaaacgttcacttaaagttggaggacggcgagacatttttttaggaacgagagaatgccaaggatatgtggagccttgtgtttttggcgaaggagaaggcttttacgataattatggtggagatattcatttaggcacaatggttcatgggcttaattatcctgatgaaacaggtaggaatgaattagaagttcgattatggaatccggtaatgagagatggaattattcaattcatccgaccagaagaatgtacaaaaatccgtaaaatatccaagatggatccaaagatttttgacagttcaaacgttgaatcagttgatgagcttataaaacaattagaagaaggaggtgaataaatgagttggctattgaatttgtatgagacctatcaatcaaatttagatcgagtcggtaaaattgaaaaaaaatataatggccaagaatatacattgctacctatttcccacactactcagtcagcaaatattgaagttttaattacagaagaaggggagttccattcagcaacagtcatagataagagcgacgccaatacattgatcccttgtacagaagactctgcaagtaggtctggtaccggagcgtataaagttcctcatccattacatgataaattaacttacgttgcaggtgattttggtgaatacggcggcagtaaaaaagaagaggagtcatttggctattatatcgaacacctaaggaattgggtagaatccccatattctacagataaattaaaaagcatttacaaatacttaagaaaaaaacaattagtgaaagacttggtagaaaccaaaatattatggcttgatgaaaaccaaaagctgattggaaaatgggataaaaaagttgaagtttttctggggaacaagcccgaaatctttacagtgcttccagctggccaagaagccgcgtttgttagatttaccgtgtattctccaaataagatgctatcaaaggtatggcaagacaaagaaatacataactcctttattaatttctatgatggcctcctagataatgaagattactgctatgttacaggggaaataaaaccgagtactgataaacatgcgaaaaagattagaaatgccagtgatcaagcaaagttaatctcttcaaatgatttaagaggtttcacatttagaggaagatttactacgtcaaatgaagtagcgaatattagctatgatgtgtcccaaaaagcacataatgcattgaaatggcttattaacaagcaaggaaaaattatcgatcaacgtgtatttcttgtatggggcaatgatgcagaagatgttccagatattgtagaggatagttacagtatattttctatggatataagaggaactaaaaagcgagaaataaaatcctatacacatgaacaatttgccaatgaagttgctaaggcaattgatggttataaaaataatttatcttccagtgaaaatgtaaatattctcttgcttgattcagcgacaacaggtagattagcggttctttactatcgtaatatggataaaaacctttatttaaataggttgaagaactggcattctacatgtgtctgggagcatggttaccgtaaaaatgcagataatgaatttgttaaattttatgggacaccgtcaaccagagatattgcatttgctgcttatgggccaaaagcaaacgaaaaagtagtcaagagtttgatggagcgtatgcttccttgcatcatagatgagagaaaaatccctttcgacattgttagaagtgcctttcagcgtgcatcaaaccctctatcaatggaaaaatgggaatgggaaaaaacattaagtattacatgtgcattaattaataaaatggagggatatcaattggtattagataaggaaaataataatagagattatctcttcggacgccttctagcggttgcggatgttttggaaagaaaggcattaaataatggtgaccaacgtgctacaaatgctaggagatatatgaattccttttcacaacatccggaaagaacatggaggaccattcaaggggccctacaaccgtatcaagcacgtttaggggagaaagtttggtattataacaaattaattgatgagattggctcaatgataaaaattgaagattttaataataaaccactgtctggaaaatacttgttaggcttttatagtcaacggcatgaattgtatcaaaaaaaagaaaaaaatgtttcactaaatgatgtagtaaatattggagaggagaattaaaaatgaaaactttagatcacaaaatcgattttgcagttgttctatcagttacaaaagctaatccaaatggagatcctttgaatggaaatcgcccaagacaaaattatgatggacatggtgaaatctctgatgtagccattaaacgaaagattagaaatcgtctgcaagacatggaagaatctatttttgttcaatcaaatgacaggaaggtagaccaatttaatagtttaagggaacgagcagaaaccaatgtagatttagtcaaagcgttaaaatcgaaggataatccacatgaacaatttgctgcaattgcatgtaaagagtggattgatgtaagaagctttggacaagtttttgcctttaaagggggagctggaaaaggtgtctctgttggagtaagaggacctgtttcaattcatacggcaacgagtgttgatccgattgatattactagtatgcagattacgaaaagtgtaaattctgatcttggtaaggataaaggtgctgatacgatgagtatgaagtatcgtgctgattttggagtatatgtcttttatggaagtattaatacatagttagcaaaaaagacaggttttactaacgaagatgcggagaagattaaaaatgcactggttacattgtttgaaaatgatgcatcagcagcacgccctgaaggaagtatagaagtacataaagtttgttggtgggatcataattcaaaacttggtcaatactcatctgcaaaagtacatcgtttattagaggttaaacggaatattgacgagccaaaaacaatcgatgattatactgtattggtacatgaattagatgatttaaaagttgagattattaatggaatgtaataaaaagcgtcagaatagttgaaagaaagtattcttataaagatatactctatcaatttattaaatgaaagtcgcatctcttgcaggtgcgtggattgaaatgacactatgagaaacatcgattcaaacggtatcgtcgcacctcatgtaggtgcgtggattgaaataggatatggaagaatcaatttttgttcaatcgaagtcgcaccttatataggtgcgtagattaagactggtaagataattgatagtaatttagtgtctctgttggagtaagaggatctacttcaattcatacgacaactagtgttaatccgattgacattactagtatgcagattacgaaaagtgtaatgtctgagcctgggaaagataaaggttcagatacgatggggatgaagcatggtgttgatcttggagcttatatattttatggaagtattcatatgcaatgagcaaggaagacagattttaccaaaggtgatgcggaaaagattaaaaatgaactggttacattgtttggaaatgatgggtcagcagcacgccctgaaggaagtatagaagtacataaagtttgttggtggaaacataattcaaaacttggccagtactcttccgcaaaagtacaccgtttactggatattaagcggaacattgacgaaccaaaaataattgatgactataacattttggtaaaagaattagatattttaaaagtggctattattgatggactgtaatgaagaaaacgttagaataattgaaggaaagcgtatttattaaaaagttaatcaaccatttattaaagaaaagtcgtacctcttgtaggtacgtggattgaaatcattggcggtagttcataagtaacaacaaatggatgtcgcacctctagtaggtgcgtggattgaaatatgatattcaaagagcctgaacaagtggaatcgagtcgcaccttatataggtgcgtggattgaaatataattgaatatgagctgccgccgatggaagggacgtcgcaccttatataggtgtgtagattgaaatatggaaatggaacgttcttacggatcaaaagaagtcgcaccttatatgggtgcgtggattgaaatatgtagctggtattaatgctttgtgaaaaacaagtcgcaccttatataggtgcatggattgaaattaaattacttgctgccttatctagattactttcgtcgcatctcttgtaggtgtatggagtaagactgataagataattgatagtaatttagtgtttttgttggagtaaggggacctacttcaattcatacggcaactagtgttgatccgattgatattactagtatgcagattacgaaaagtgtaaattctgatcttggtaaggataaaggtgctgatacgatgagtatgaagtatcgtgctgattttggagtatatgtcttttatggaagtattaatacatagttagcaaaaaagacaggttttactaacgaagatgcggagaagattaaaaatgcactggttacattgtttgaaaatgatgcatcagcagcacgccctgaaggaagtatagaagtgcataaagtttgttggtgggatcataattcaaaacttggtcaatactcctctgcaaaagtacaccgtttattagaggttaaacggaatattgacgaaccaaaaacaattgatgattatactgtattggtacatgaattagatggtttaaaagttgagattattgatggaatgtaataaaaagcgtcagaatagttgaacgaaagtatccttataaagatatactctatcaatttattaaaggaaagtcgcatctcttgcaggtgcgtggattgaaataaagaccatttgaccgagaatgatagaagcagggatgtcgcaccttaaataggtgcgtggattgaaattggttattttccattcgtgttttatgctcctctgtcgcaccttatataggtgcatggattgaaattttaagtcgtatacaacagtaacacacaaagaatatcgcacctcttgtaggtgtgtggagtaaggctgataagataattgatagtaatttagtgtctctgttggagtaagagaacctgtttcaattcatacagcaacaagtgttgatccgattgatattacttgtatgcagattaagaaaagtgtaaattctgagcttgggaaggataaaggttcagatacaacggggataaagcatcgtgttgattttggagtctatgtttttttatggaagtattaatacacagttagcagaaaagacaggttttactaacgaagatgcggagatgatgaaaaatgcactggttccattgattgaaaatgatgcatcagcagcacgccctgaaggaattatagaagtacatagagtttgttggtgggatcatatagttcaaaacttggtcaatactcctctgcaaaaatacatcgtttattagaggttaaacggaatattgacgagccaaaaacaatcgatgattatactgtactggtacatgaattagatgatttaatagttgagattattaatgggatgtaataaaaagcgtcagaatagttgatagagtatcttcttataaggagatactctatcaatttattaaaggaaagtcacatctcttgcaggtgcgcggattgaaatttttaaagccagccttccaacccaaaaagttagtgtcgcacctcttatagttacgtgaattgaaattgctagtgctaaacgtctaaaggaattgtatgggccgtcacacctctagtaggtgtttggattgaaagtggtaagacacttgatagtattttattaagtctaacgcattaaataccttttgattaacgttcttcacaatcttgagaaagaaggagtcttttggtaatgcgttaactttaattaaaatttcttgaaatatataacgatattatataatatataggtatattgttagtttaattgattccgtttattcccacaccttattgtgttgtggttgagttgtagaagcaagttgcgtcttgtttcaattttgaaagggcttctttgagccgattagtgtatatatagcttattttgctatacacattattaatcgacttgaagaagctctttttgtgttgttttcaagttcgcaggcggggccatgtatcaaaatatagcaaattaaacagttaggggagataaaacaaaatgaaaaaagattgtagacacttacgactagtaccaacagtagaggagcataaaacacgaatagaggcaaatgagacatatcaacagaagtcatatgctacatctacaatgtcatctgaaacaagaggaagattaaatcaaatgcgaggttgtttcgaggctgaaattatattaccagttggtaaatttcaatactttaaaccacatgctatgaatgaaaaagaagccattcaagaaatcgcattatttattgaagggatacaggaaatgaacataggctatgttatcttatggcgctttgttgggcaacaaagtttttatagtggtactaagatcgtagccgaaccaaagtttcgtaaaatcatgcgtaagttgaaagattatctttttgactacgaagaacttatttatgaaacagaaaagtaagaaggatagagggatatagatatgaaaaaagataagatttggacagtattagatgatccaaaagagcaggaaacaaaagagcaatcccaagagccggatgatatttttgctggtatggaagagctatcggagattacagatgatgaactaccattttaagcaagtcgaggtagtttatagagggtaaaaggaagaactaagtgatgtatatacttggatcttcctttttttattgcaaaaagaactttggagggaaatatataatgcgcataggtaacgatttagcggcgggatattatccaacaccactattagaagggaaacacttaatacagttattacaaatggaaccagagcgagtttatgcttgctttgatccatgttgtggagaaggtacaattttacgaagttttgcagatgaggtgagacaggttagcatacaaattgatacatatggtgtggaagtagatgcaaatcgatatggaaaagcaaaagagcaattagatgaagtggtatgttcggactttgaaagtatgatgattagtcatgactactttccgcttatttttttaaatcctccttataatacggagcttcgtacagaaaatacaaaatcagagaaaatggagttcaacttcctaaagcgtgctcacctttatttacaagatggtgggattatggtgtatgtcattccatacgacaaatttgctagggacgatattagctattttatagcaaaacattatgaggaaataggattaatgcgttttggcgatgaaaatgaagaatttgagcaatttaagcaatgtgtttttattggccgtaagcgtgcagctacgaagaatgatacatatttcaatgatcgatttgctaatttttgcgaaaatatgtctgacctttctttcgtcaaaaaacatgtaaatacattagcagaaatggtaaatcgtaaggactgggctataccagaattgcgtcatcaaaacaaacttatttttacatcacgagtggattataaaagtgcttatgaaggagttgggaaatcggaaggtatctcgtcgttcaaaaagcgtttaaatagagggaatggttactcacttcaaggtgagaaaacagctgctgaaagagcgaaaatgccgattgcttccggacaattaggactattgctgataacaggtgtggcagacggcttactgggtgaaggagatacactccatgcggtccgtggatctgagaatgtgtattatgaaacttcatttgagccacttcaaaaaacaacgaaagaagttgttttacaaaaacgccgcgcgaaatttatcatcgcaacaccgaccggtgaagtcaaagaacttgtctaggaaaggaagaaggctatgtctgtactattaggaataggagcattatttatcgtatgggaatttagtaatcgtatgtttcgtattgctattgtacttacagtcatttgtttatgtgcttctcaattaggtgcaggtacatatttggaagtattagagcaattctcagcgttccaaggtgcaggtaatatgctacatgcggctgaacaatcattaccagagtggaaacagtttatagatttttagccaataaattgaatgagtaggacatgagacgtatcgaataagatgcgttttttattttaggagggaaacttatgatacaagaaataattcaacaagatacatttgaccaggaacaaacaccagcaatgttgcaattggagacagccgttgcctcacatacagctttttgttttgcaatggcagtaaatcgtcatcaacaaatccaatttgcagtactaggtgcgaatgacagtacattaaagtcattccgtgctgccatatcaatgggaactaatcgtttgtattttggagagggaaaaaaagaagaattacattacattttagataaaaaagtgaatgtaaactcaaaaggtcagtttgaatttattaacacacaaacagcaaataagaagaaggcaattattgcattttctagagaattagaagaaaagtatattgttgcaattgacgaagcgccagagaaacaagtaagggatttcctaatggctcctccgtatggtttaccgatcttagaagaatgggcgaggccaatttatgaggagatgctaacaagagatctattacaaccgttagaggtgtattttgataagaatgagttttcttctctaacgattgcgcaagtcttactaaaagaaacggattgtaaagagtttttatcagaaatgatacgctctgggaaatgtcaatttccgcaagaaggtacaggtgaaaaaatcaatgaaattaatgatttaaatgaatacctattggaatattcacctgacatgcttgataaggttacaaaattggatgagcccttacatcaaccgatgaaagatcaggcattatctcattttgatacatatcaaagaccattattccctgtacaagcacatgtagcaacaggtgtagcaaaagctttacaagtacaaaagggaatcatcttgcagggggaaatgagcacgggcagtgcggcacgttccgctataagtgtagcttaaacacgaaaagcgggggccaaatcttattaagattggttacaactctttaaacgatttacagggtgaaaattccctgtcatgactaatattccaattcaagtcatgtctatgagactcctacatgcgcctatcattccaatgtgataggggtctgaagctaggtgaagccgtccttgaagcgaactcgttaaacgtggatttagggcggtaggctttaaaaacattctatgatgagcgaaatcgaaccctcgtatgtacgctccgttactcattccccaatctaataacgagatatatgattgggtcttgcgtgaagatatttctctcttgcctgaggagaaattgcttatataggtctttccagagtttatataagattcatgagagttaggaatagtctactcatgaacaagtagcgtcggagtatagagggcatctaaggaatgtaaaagaagggctggtttaaagggaacgtgcgagagccaataagcggaggtattggagcctatgaaacttattggaagtcagcgacaccatagtacctatgatgaatagccgtttgtatcttgctataagttgcttctgcaacgaagtgtaggagaggagagaaactattctagggaagggtgttagtcgagaagtattgcactaattgaggaaatgttcaaacgaaccatgtgagagtaaaagagttaattcatttcggatagtccatttctctaatcaagggggcgatccatataaaaatgaaggataataaacaatttccacaaaacgaaaaagagctaaaactagcactcgatagcatgtaccgaatagccaaagaaagtagtaaacctttctataacctaattgaacttatgaagaacgagcagactatactgaccgccattcataatatcaagggtaataaaggaagcaaaactgctggcactgatggtaagactatggactactatcttcaaatgggcagagataagttgatgtctctaattcgtaggaacattaataactatcaacctagtccagtaagaagaaagtacattccaaaatcaaatggtaagcaacgtcctttgggtattcctaacatgatagaccgcatcatacaagaaatagccaaaattgtcattgaacccatagccgaagctaaattttatcattatagctttggtttcagaccaatgcgttcagctgagcaagctattgctgaaacacttgaacgtatcaggagaagcaaaacctattgggtaattgaaggcgatattaaagggtatttcgataacatcaatcacaataagttgattgaaataatgtggaaaataggaatccgagacaaaagagtgcttatgatgattaagaaaatgctaaaagcaggaattatggaagaaggaaaggtcagagataacgttagtggttcaccacaaggcggtatcatctcacctcttttggctaacatttatcttaattattttgattgggagattgctagaatgttccaagagcatccagctagatacaaggtcaaagacgtttctagaaatggactacaacgtgtccgacaaagacatgaagatacatttctaattcgatacgcagatgactgggttatcctttgtaaaagcgagggaaatgccaagcggattctcaaaaaagtggagaaatattttaaccaccaattgaaactggagctgtccaaagagaagaccttaatcactgatgtgagaacgaatagagtcaatttcttaggattctggatttttgcagaagaacatcggcttagaaaaggcaacatacaaggaaaagctatccctaacatggataaagccaagttgaaaataaaggagattaataaaaatattaaaaccctttatgaccatcgtggtaataaatccaaacaggttgccataatcgagagtatcaactcaaagattgttggcatagcaaattattataaaatcgccaatgtatctactatatttcaagggtttgacaaacgtattcattacgcccaatggagaacatggttgtttatgaacaatcgacgtggacgatattatcaactaaccactccagcggatactctcttaaatagaagagatagacacaaagagcaaaaaagtaaagtattcttcattgaagaacatggagctaaagtaggaatcaccaaatttgcatttacgccaaaacgtaatgcgatgaaagtgaatctcttaatgtcgccctatacagataatggccgaagtatttataaacggacaaccggcaaacgtgaggcactagaaagaccgaatttcttccaagaagagattcctttctaccaactcaacaaccgttatccgatatataactttgaattctatctgaatagagaatacgcatttaacagagataggggaaaatgtaactgttgtaaggttcagctaaatgaatggaatcttaacacacatcataaaaaccctaaactaccgcttaataaagtcaataaggtgataaatctggtttccttgtgcaaaacatgccacaagctggttcacaacgaaaatcccgttaccaatacaaaaggtggaaagaaaatagagcaacttagaaagttgcttaaagaggttaagtaagtacggctttcgaggataaattaactcttattcgtatttgaacaaattagtgtaatggcggttatagtcgtaatgctataacagtctttatggagaactgagacaacagtttgaaatatggtttcccgatggaacgccgtatgcggtgaaaatcgcacgtacggtgtggggcgggggaaaaggtggagattacttcaaagtcttacctatcgcacccgaaatgggtagtggctacctcaatccttacggattgagatgccacacataaagcgcaatgatgacagctgcagtagatggctattttcatttaaaagggaaaaaaggatatcgtacatgcgtatttgttccaccaactcttactgagaagtgggcaaaagaagaaatacgacacttattaccagacgcagagatacaccttattaaacgaactgaggatcttattcgtattcatcaagcttggattcaggccgggagaccaaaaccacaaaaaccaaccttctttgttattagttttacaacaatgcgaggagattctatcaaaatgatgccattatcttataagcagactcctctttctaaaaaatctgaggaagaggtgcaaagatattataagaatggctactactgttcggattgtggtgctaagttacgtaaaaaaacatcttctatcatggttcaacaggccaatggtgaacaaaaagaagtatgtcaatataaagattttacagctagtgacttagatactaaaacgaataaaaatagtgtatgtgctgattgtaattcaaatatttggagcccaaaagtaaaaacaaaatatgcaagttttaaagagtggacaaaatatgaggaacaattagtgcaggcaattaaagagggaaataaacctttacaaaaacaactagagttagagaatcgtgtaaaaccatatgacgcaaaacattcaggaagagcgtatagaaaagtagctgctgttgagtatattcgtagaaaaatgaagcatttctttgacgttcttattgctgatgagatacatgagctgaaaagtgaatctgcacaaggaactgctttaggaagtttagcaaaggtttgtaagaaagttgtagctggaacaggtacattatttggtggccgcgcaagcgatgtattctatacgttatggcgtttattccctcaaaaaatggttaaaagtggttttgaatacagttctttcatggaatggaatgaaacctacggaaacatcgagagaacatattaccatgatggtgaggtcacatctaatatagcttcacgcggagcacaaggtacattagataaaactaaggttgtacctggtatttcaccttatgtgtttactcaattcttaatggatacaaccattaatgtacgtcttaaagatgtatggccaaatcctgtggaactagtcaacgtccctacaattcttgttgatatgtctgaagagcagaagcaagcctatgagcatatgaaagagtcgtttgaaaaagcaattgaagcagcgaaaggtacaccagacgctgggaaactgtggctttcttatattcgtacaggtaatgcatatccagacaatatgatccattatccgaactattacttagatgatgcaggaaaagaactggtttggtctaatgataaattcaaatttgatgaggattgtatacagcctaaagagagagagttgcaaagtatattgcgtacagaaatttctgagggccgtccaaccatcgtatacgtatgtgatacaggatctacagtaaaagaacgagacgttcaaccacgtttacagaaggttgtagagcaaatatctggtgcgaaagtagctattctccgtaccaatacagttactccgccaaaacgtagtgaatggctaaaagatcaagtgaatagcggtgtgaatgtaattatttgctcgctagaattagtgaaggtgggtcttgatttacttgcaacacctacattgatattttatcaattaccatttagcttattcgcgttgaatcaggcagcaagaagacactgtcgtattggccaaactaagcaatgtaggaccttctatcttggataccgagaaacgttccaacagcagatggcgcaattaattgctcaaaagaataaagctgctgaagcaatgaacggtgaggttacaagtgatggtctgaatgcaatgcttggtgatactggagatctacagactctattaattcaaaacataaagagtggaaatcaattaaagggttcaacagaggaatggacaaaagcagcatctgatgaatcgaagcgggttcttgcaaatatcggtaatgtgattacacctgtgtttgaatcaattgaaattcaatttacgaactgggtgggaaaattaccaggaactatggatgttgcatttatgaaagaagttcaatttgtacaaagggctgttgaatgtattaaaaaagaacaagtacctggagttcgagtgaagaagaatgtacttgaaatagctggagaaatagaagatgtcattcgagctttaacaacactgaatactgataagcgtatgcttgtacaaaaacaagatatcacattctgggattcagttattgttgaagtggattcttctaaaaagaaaggaaaacgaaaaaacaaagtaattgatggacagtttgagttcgatttatttggataatcgagaggggaatattatgtttacaaaaatatttattggtctattttgttatgtgtttttggtagttcgtaattcaaagaaaaaatttctaatggaagaagccaagaaaaaagaaatggaaaataaaccggtggaacgccccgtttattggtgcccaagagaaaataaacctattggaagggaacaagagcgtgttactgttccaacaaaagagatcaccttagaaaaagatgtagcaagtatatatgatttagttgctacatctgttcataagaatctgggtgaggaagagagtgatagattaaaacatgaggatatagaagaagtggagtatgctgaagattttcatcatactcccactcctgaggctgtatatgatattccttttccaagtgatgaggatataccagtggaattattagaatatgaggacatgtatccacaacaagaatatgtttcaattccaccggaaacagaacacgttttttctgttcaacaaggagtagctgatgttgaagatatggattttgtgaggtggactgcaaaagtaatagaacaagaacaaggactgacacgtgtcataaatatgtctaataagaagcgttattggattcatacagagggagaaatattaccgaaaaatcaattactgtatatgaaattagaggtcaattcaccttattcttatacactagttgaatggagtaatagacaactagggaatatataaatctatttcctagttgtattttcttagttaaatagcatcaaatacagcattttctcactcatttgtacaagaataaaacatttttttatttttgtacaaatgagtgggacagaatgattcaccatataaggatattcgactataatgatacattgtacgtcattgtaatattgaaatgttttgagattcaagtgattaacagtcttaaaacaggagaattgagaactcttcgtaatattacaatgcttaaaatagattaaatccaaacatgaggattatatgaagtaaaaaatatttttgagttaaaaaaataacaattttgaaaggtgaatgtaaatgaatattaattccataagtaacaatgtagtagaaaaattagaacaaacggtgcgctatgaaaagaaacaagtccaggtattacgtgtaagtaaaagtagttctaatatacacgcttacatgatttttccggaattctcagaggttaaaatttcaaataccgaactggatgaatatatagaaaatctgtcaacaagcgtgaagtatgtcattgatcgcaagttgagtcaacaagaaattgaaaaacaaaatcattctttcattatgacgtgtgaagtcgaggaagatggtgtgatagatgatgaaacgattcattttaatacgacgtatgtaaaaccaccaacaattgcaaataaagtatttaagttggtatgtggattagggaatcgcttagatagcttaaaagaactacatattacagtgttaaataataatattaaccgaattgaaattgagttttacaatgaaaatgaaacatatgtggcagtagaaaaagaagaaattgcaaatgcaattatgggggcatatacaaaagcaaatatctattatgcagcagatctttattatgctgcagaaggaaatgaaattaaattaaagagcatcaaaccaaaattagcgggtgatgtgtgatgaaacgagaaaaaggaatgataggagtcttatgcacgcttgttttgatgattttattacttgtacccttagaagcagctcaagcttctgtaaaagtagattttaatgagttaaaaggaaatgatgtttcgtcatcatttaaagatggactaaacaatcgaatgaaaacaacagagaaagaagattcatttggatcatcaatcattcaaaagattgaaggattgtatgcgccggcttttaaagtaggagtcaatatcttttctatttcattcgtattaggagttattgtcatggttatggcattaattacaaagaatggtcaatggatgaagtgggcaaccggaagtatgattttctcatttatcagcatgatgtcgatgagactaagtgtatacttcttatttagttccgatgtattttcgtttatgaacatctttacggattttttagacctgtttaaagcaacagcacttattttcacaccatttatgttaatcgcaggtattcgtttaagaagaattcatgagagtacaaaacagccggaatattaccgttgggccaaccgtgtcataacgggatcttgtttgctgtgtatgttagccgtactcgctccatggctatttgctaatatgtaaagaactatatataaaaatagaaaaggtactgaatctacattcagtaccttttatctacccattaggttctttctttcatattcttcaaatacttcttctgatattggcgatagtatgccacttaaatacacagcggtatataaaaagtattggccatcatttgtttttattgtatgagtaccgtgttcctcattgtttggaataattcgttcaattttgagttgctttttatcacaaatgatctcttttactctatataaattatgtgttggtaaacgattaatatacaaacaaaggtattctagtagaaatagaataacagtcatttgtagaatgaaagcaatctttaatagagttggtatggatgcaaataatactagaaatatagagatcaagaaaatatttaactttgaaaaccatttttcatgttgatttaaagaaataatacttttcttattctgaaacacctggaacctcgttataagaaaaataattacaaagattccttcataactaaaccaggttttccactccgtatcagtaagttctagcaatatatatatgataccggtagatacgatcagtggtaccagctgtaccaaactaaatagtatggtatgttctaacattcttttcttgtagatacgattagtaattgaatccaagtttcttaactccttctgcaattttcatgatgacaccaccaataagaagatggtattcgccaatccctttttcatttacgtaccaacacatatagtgtcggataccttcttttgcactatggtcatgtaaaggaaaaggagatgcgtattttttagatgacatattattatcaccgaaaggtacctgttctgcaagtgcaaaacgtttcttcgaatcatttataatccaacaaccatagtttactgatccataccatattgcgtctttgtgaattggatcaatagaaggttgtgctggataactttcagctagtatttgcgctttttcttcacgaagttgctgatgtatgtgtgaatttaatggatcttccgttccgatttcataggtttcctcaaaattcccacactcataagggataaggggattatttgaatcagctgctaattgtagactgcaagaatctgattttgaaagatagtatacacagtctttgcaagtgaaaaagtttgaaaaagctgaatctgtttcttgttctgttacggtattatctactacaagttttaacatgtctatcacaatcctttttaggctagttcgtaaattaatatagacgtatcatatcatgcttataaacaaatgtaaatattttccaaataaaaataaccttattaattttgaaaggactgtttgtattgaatagaaatcgagaatatattgctttgcgaaattctatattaataggctggttactgacaggcatcgtaataggcctatctatccatttttcttctgttgtttatttattaattggatgtttcattctatcgttaaaatacggattaatgggtaccgtgaaaaatgtggaaaaacgtttgcctacctgggccaactttggcgtcattgaaaaaccagttaatagaagagtaaccagaccttttcagtttcgaggtgggctccttgtttcattagcattaggattcgtagagatggtgataaaaggcttatgtatctcatattttattttaggattagaaacgcatgtatatcgtttaatgcgcagaaacgcaagggtgtaaaaaggaggactctattatgaaagtattgatatttgaattgattcttattgcggttctaataccgttgaatagtgttgtgaaaaaacatgtaccaaaatggaaaggaaaagctggagagaaactggtaaaacgtatactaagtaaattagatccaaaaagttactttgtgttacataatgtgacggtttatacggagtatggtgatacaacgcaaattgatcatattgttatcgcggaaaccggtgtatttgttgtagagacaaagaactatgaaggatggatctatggaaatgagaaatctgcaaggtggacacaaggtatttttagaaagaaagcctcttttcaaaatccatttcgccaaaactataaacatataaaagccattgaatgggtgatggaacaacagctgccatgtatctctattgcagcgttccatccaaaatgcagtctaaaaagagtacatgttcattctaaagataaacatgtactatattataacgatctacaaaaatgtattgaatcatatactgaggtgcaactaacaaatgatgaggtccaacatatttatcaaactatgttgcgagcaaacataacggataagggtattgaaaagaaacatgtgaagtatttaaaaaataaatttgctaaacaataagaaatggagatagagacatgttatatgtagtagggtttatcgtaatctctatagtagctattcggcttaacatgaagtattacaagcttagggggaattttaaagattttgtaatgaagaaaaaagagtagaagatttctaataaaaggttttaaagtccatttcaattgaaatggactttagtattcgcataaggttaaaataaatcttttttattatgaaaatccccaagaatgttgcctttacatttgagggaaacaagaaagaaccctatttagataaaaaagggttctttcttgttttatgtagcacttattaaaaagaaaagccatgttataaaaaatgctacaactaagggaattatttttaaaaagattaataggtttttatttaagtaggtgtatttttctttgttgaaaatatattctagactaactgctatacaaatcaggatcagtataattaaaattgatttcttgatcagtaaattaggtaccaaattatataaactaagacctaagagtacgattatagatgcaaataatcgaatgttttttttcataaatcgttctccttttcaatttattagttacggtgtatgtgtgggtgtcctgtccacgtaattccaactgtaacgccttttcctttgttaacaacagctaatgtagcagctccaagtccaactatagccgcaattaatcctaatgggactgaagctggtattgttacatatccagctgctgctaattcggctgcaacccaaattgctgcactaccccatgccattgcttcagctagtgattgagtttcagaattacttagttttaatccgaatccccatccataaaaaccagctgaagaagattgtaattctttgaattggcttaggtcattattaacatatgaatttagtgtttgtgttgtggaaagttttccagggtttccttgttcatctttttctagagtgaaatatccttttttaatgtattcattttctaagtttaatccatttaagaagttttgatattcctcatttgttataccaatttcatctgctgttgcattaatatataaaagtccttctgcatttacttttacatatggagtaaatgtttttgttgtgttaagtgtttaattaaattgttcgtttgtttgaatgggaataaatttattactttgattttcttgtacttgctctgtttttactgctgtttgtttttctgttgcggcttgagaaatgctaggcgataggctaccaagtaataatgcaccacttaaaactgctgaaatctgtttaactttcattataaaaccacctttttattgtaatttggaatattttagattcctattacattgtagtttatatttgaaaatattgtaatattttgctatcaattggaatgttatgttcgattaccaaacccttacatataaacctaattatacaaaaaatgacagaaagattttttgtattcctagaatctcccactttttgaaattatatatatattcatattatcatgttattacactaggttaaattttgggtaagttgatatattaaattctgaatattttatttgtattattgtgtattatatacggaggtgcaactaacaaatgatgaattgcataaaggaagtattatgctataattgaattaatccaatactaaaaaatcatattgcaaaaggacacacctacgcataaccatagcgtaggtgtgtccttttttgtttgaggaggaaaaatgtatgggaaaaacgttatttattgcggaaaagccgaaagtggccaatgaaattatgaaatcgccacgtttccgacactcacaaaagtacattggaagcaaaccttattacggttattacgaaaatgatcattatattgtcagttggtgccgtggacatttactggaactgaaaaatccggaagagatggatccaaagtataaagtgtttcagttagaacatttacccttaatttttcaaccatcgtataaggtgatacaagaaaatgcagagcaactacaaatccttgttaaactgttacagcgacctgatgttgaccatgccgtgaacatatgtgacgcggaccgcgagggagagttaatctatagggaagtgtacgaatacgcaggtgtgaataaaaagcaatctcgcgtatataaatcctcttttgaagctgtagaactcgaagcagctctcaatcgattagaaagcgcgtctaagtatgatggactagcttattctgctaaagcaaggcagtatttagattatctattagggatgaatataaccaggggatgcaccacaaaattagcgcaaaataaattcctattggcatctggccgtgtacaaatgtgtttgctacatgagatccgtcaacgtgagttagcaattgaaaactataaggaacagtcttattatcatctgcagctagtaacaaatttaggactcactccagttatgaaaacagaagatcaggtgttaaacccatcgccattaaggagtttaggggagaagctaaaaggtcaatatctcacggttgaggaatttaaagagggcactaggaagcaaaatcctaaattgctatacaacttaacagacttgtacaaagatgcccatgcacaattacaaattaatgctgaaactgcaaaaaaatacattcagaacttgtatgaagaaggttttataacctatccacgctcttcgtctaggcatttacctacagaacaagtggaacgagtaaaaggtgttatgcaggcgctagctaagagtcgttattctttactggtacaatccgtcgatattgacgccattgatataaaacacaaaacatttgatgatgatcttgtatcaagccattttgccattataccgacgactaaacaatatcaagaggaaggtcgtccagagattgaacaacaactatacagtctcgtggtaaaacgttttgtgggcaatttcatgcgtcctgcagtgtacctggtaagagatgtatcccttattgatgcaatgggaaatacctatcaaataaaagaaagtgtgcttcgagaaaaaggtttcctagaagtgttccaagaggaagtagaggaagaaagtgtggaaacatttaaagttcctatcctgcagaaaggacaagaacttcaaatctatgattttgagttgctggaatccaaaacaaagaaacctgctctacacacagaaagctcaattcttgcttttatggaaacggctggtcgtaaaattgatgatgaacatttaaaagagctgatgaaaggaaaacgaattggaaccgtagcaacagaagcggcttttattccggctttacacgagaagaattttatagacattgaaaagggaaaaattattacaactccaattggccgtgcctttattgaacaatttcctgttcagcaaattaaagatccactgtacacagcagaaatggaaggaatgatacaccgtattgaaaagaatgaaatgagttataaagacttcattgtacaaacaaatgcgtttgtacaaaaaataacacaagagattataagaattcctgatacagtttcgtataatctaatagaaacctggaagcaacaaatagaagtatgccaatgcccttgtggaaatggaataattttagatagaggaaagtttttcgggtgcagcaatcatccgaactgtaacattggcttgcctaagaaaattaaagacaaaacaattcctacagtgcaagtaaaaaaactgtttgaagagaacaaaacggacgttataaaaggatttaaatctaatggcaaagagttttctgcttatctagcatttataaatggtgaagtaagctttaatttgcctacagttgaagaattatcgctaggtcagtgtccaaagtgtcaaaagggacacattttaaaccgtgataagttttttgggtgttcagaatatcaaaacggatgtaattttgcgatatcagctaaaattaaagaaaagaaattatctgatagccagattaagaaattattgaagaatcgcgttactgacttcattcatggttttaaaggagagtacggagaattcactgcagctatccgattaaaagaagatcttagcatttgttttgaacgtccaacaacggatgatcgtactatagggaaatgtcctttgtgccaaggaagggtaattgtaggaaaaactacttatttatgtgaacattacaaaaatccttgcgaattcattgtgtctggaagcattttgaaaaagaaaataactagcgcacaagtaaaaaagttattagagaagaatatgaccgatacaatctcaggatttgaaagtaagaaaaccggagaaaaattcgatgcaaaattaacctatgatgtacaaaaacaacgtattacatttataatgaataaaaagaaataatatcataaaatcttaaatttcatatataaaattaataggaactatgatatgatgaaagtaacaaaatacttctaaaactatcttgcaaaaggacacacctacgcatacatatgccataggtgtgtccttttttatgtatttttagaatttcaagactcaaaagggggatatatattgtgtaccagtaatatagcatctgctaatgtatcttttgaaaaattgaaaagtcaggaagagaatgaagaaagtatggtgtcaatatgcccgcagtgtaaggaacggtcatatacagcactttataatgatcatccaaaatggatacagttttgcctatgttgtaattatcgagaagtaaatactatgaatagtccgtttgtttattagatgcagctatttacgtattttaagtaggaggaagaaatttcgatatgaaaatatggattaaagctatttgtataacatcattcgtaattcaaatgtcagcatgtagcagttccgtgcaaacaaaaaatgattcgagacctgcccaagcagtacaaaacggaatacaacagaacgtagaagggaaaggtattgttgatattccagaagcttataaagggaaattaaaaggcttagagaccgttaaagggaaggtattacatattaaagacggagatacgatagacgtaaacgtaaaggggcagaaacagacggtaaggttacttttattagatacccctgagtctgtatctaataaaatcccaccacaaaagatgggaaaagaagcctcttcctttttaaggaaacagctagaagggaaaagtgtaactttggtttatgatcgagggcaaaaagaagacaaatacggtaggaaattagcttatgtcttttgtgatggaatacacatcaacgaaataatgatcaaatcgggttatgggattatagcctatatttctagacctaatactacattgctaccagaaatgctagaagcagaaaaagaagcaaaagaaacaagggctggtgtgtggaacattaaaggatttgtagatgaaaagaaccgccactataaccgcaatgatgcagcttaatatcgatacttattcaaaaaggaggtccataaatgaatggaaacaaaagaaacatgttcttatctttttttatttcaactttctttatttttttgagtctcttgccgtttagtagtaatgaatatgtatatgttatttcaaaaatcggggctgcagctggtgtaataaatattgtgatgatgagcgtattcttatattttcagagcaaaaaaacgagacatctcttgagttaatatgatacaaataccagttttccttactcatacgtaaaagataagagtaaggaaaactgaaaggggaagttgaagatgagtcaaatgccgggggtcttgaagtttgttttagcaaaggaaaaacgatatgtatatttggttgtagcagaaaagaaaaacaaacgagtgaaaacacatgttgtatatggattcggtccactagagaaagcattagaaactatgtatggaatgcgtgataattttgagaatcgctttccaccagatttaaaagataagggatatgactgggaagatttaaatgattggatactatccatagaaacaggctattccaaatacggaaataagttagtgacattctaaatagaaaagtgaggtagtatcacatgcttgatacgaaatctttagaaccgtatttttgtttttctaattcaccaggtattcagtatatcggaacgtattgtccagattattctaaagatgaaaataaacatgtaaaagattttttgcgaaaactcatagattgcctttcgcatgttgaaccggcatacagccatgaaattatattaagatttttacaggatgaaacatatcaacaagagatactatcacatgcgaattttcagtccgcattcgatgaacaagcaaaagattctattattcatatgctagtaaatgagtctgaaataatagaaacagtaagtactagaatgaagcagttaataaacggagtaagaaagccgatggatcctgataagtatgttttactagattttattcaaaaggcaaatacatattttgtaccgatagacgatggacgtaaggagtatacaaaatggaactgatccgtaagtatcatattttctgcgcttggacaatcgctataagtgcaatgttgattagtttgttttttagtgaatggatgaagttacctccatgtgatttgtgctggtatcaaaggatggccatgtatccattagtattaatattggggataggaatgtacagaaaagatccgaacgtcagcacgtatgcattcccatttgcgtgtatcggcttaatgttatctgtatatcaaattacaattcaaacgtttccagctagtgagatgaagatatgttcagtaggagtttcttgtacagaagattatctgaatttatttggtttcatctcgatacctatgctatcatttgttggaattttagccatcatagtacttttatatattaaacctgataaagagacaaaagaacaaataacacagcgattataatcgatatactcatataaacacaaaatacttataacttaaaaataaaaaaggaaactaaaaaggagaaattaaaatgacaactattcaagcaagtaatgaaatgcacaaaatcccagaggcggatgtagaattattaaagattatggcccatccagttagattacaaatcgtgaaggagctagaacaccgcaagatttgtaatgtaacacaattaacggagctattaaatattcctcaatctacggtatctcagcatttatctaaaatgcgtgggaagattcttcgttcggaaagaaggggattagagatgtattatcatattgtaaattcaaaggcatgtcagattgttagtgtactaggtttatagaatagtcttgaacggtaaaacaagaacctcatttcatttttgggttcttgttttactatagttttagaataatagttttaatattttgaattttattgatatatattcaaaaatacacctattaaattacaaattctgttattatattattaaaagaaaatatgataattggtattgagggggtagattatgaatatagcaatcaaaggaaacgaacagattctgggcttattaaatgattggtatgtggaaattcgtgcacggcgcataagcaatgcgcatcgtttaaaagaagaaattgatggtaaaattcaaaatataaaagatcagaacttattattatactattcattattagattttcgtcatcaatatgtaattgataacttaggtgtttctacaagtagttttgataaagtagaatcttttgagattccttctaacaacactttaacttattattatcatttctttaaagctatccatgctagtggaactggtagttataaggttgcaaaagaacactttgatcaagccgaaaaattattagagcttatcaatgatgacgttgagaaagctgaattttattataagttaggtgcattccattttgatatttgtgattcactggtctcttttcagtacacaacaaaggcaaaagaaatgtttttagcccatgctgattatgaacgtaatgtcggcttttgtgagaacttgttggggttagcttgtataaacttaaaagaatggtcattagcagaggaacattttgcggccgcaatggacaagttccaaaaagtcggagaagataagtttattattatggtgcgccataacttgggttggatgtattctaaacaaaatctatcatctttagcgattcgttatttatctgaagtcgttgaaaattctccaaaccattacaaagccatgtatgcaaaggcattggaacattacaaactggacgagcgagatgtcgcagcagaactcattgaaaatggattaaatattagtaagaaacttaatcaagaagagttcatacatcgatatctcattttacaagagctaaacaatgcttcacctactcaaaagctcgaaaccgtagtgctagcaggaattgattacttcgaaagagaaggattgtatgaagatgttcaagagtcttatgagacgctgggaacaaaattttatgacgaaaagaatcatcatgaggcgagtaagtatttccatttagggttgaaagcgaaacgaaaattttttgaggaaggagctttaaaatgaaaaaaatagtattcagtttaatgggaattgtcacggctataaccttgactataggtgtgacgaatacagcgaaaactccacaatcttacgaagtaattcaaagtctttcagttggagatcacggtggttgatacactaatttaatgtataataaaaagggctaggatttatcatctagtcctttttttattgattggatgttttcataaggttcaattcgtaaaattgttaaagcgtatgccgtgattcgaggcctactacgtctttggttcaaataagaaaaaatacgattggggagtgaagagcaataaagaatcatatcaggagccctcagggacaactattgcaaatcaataagaaatggtctcacctaaagcaaaaacagcgtgaaaccatatcaacttggctgagagaggcttatatagagaagattaaagttcataaccgtagattgaaagcgagagaacatgaggatgttttagaaagggtaatgagtaaaatctatgatcgtaaaatttggattcctgattatgaagtcgaaaagtattacaagggaaaaataaatagatggtataacaaacacatttcattggatgaaaaaaatgataaggaggagaatatatgaaacatagtatcggaaatgtgagtacttcatatataatccgtctaattttaaatgatttagacggatttattacagcaggaaaaagggaatttaatttttgctcagaatccggagtatcctctgtggaggagctaatttctgattggttggagtggtttaatgattacccgcaaggtatatcgccagatgaattaaaagaaattgaaagggagataggtgaattgatggggagtatgtttatatggtctcataatattgaagaaagagaagggtttataaagcaatttagcgattatttcggagaatatataggtttttgtaaattagttagggatgtatatcttgaagagttgaaagatgagttgtcatattaacatcataaattcctaatattattataaaaagaaattaaaactaatgttctttaaataatgaaaaagttaaaggagaaaagaaagtgaaattagagattgaaaagtttattagtgaaatagaatttccggaagctgctatgggtcttattgaagagggaatattatgttataaagcaggagcttataggtcagcgtatatcatgtcatatttatttttcttaagtgtagtgaagcacagagcattagaaagttcatatgctcccattgggtatggtagggaacgaaagaagaaaacagacgaaattccaaacgatgaattctgggaaagaaaagtattcgacttaattactacaggaaaatcacatagttgttattttgaagttagcgaattgataattacacaaatggaatattggaggactttgagacacgagtgtgtactttctaaaggtaatcagtttgtagcagcgcatgttgaatcattttggttatttttacaaacaactctccctgagttattaattaactgtaggaagaatgtcttatctagagaggctgaggagattttagaaaatttgtttgaatgggataaaaagtgaagaggttttatcggatactttaatgaagaggaggaagctatgacaatgtagcttcccctaaataattgcacaaaatgttgattttgtgcaattattagtattttttattcaaattgtcttctttccaagcgatcaacagcctcacgtttcttctcattattaatatttgtatagatactagtaacttctacagaagtgtggccaagttgatctcggagtaatactaggtctttgttttccttataatgatttgtagcatatgtgtgccgtagtttatgagggctacgcttctcatcaaatgcacttgaatatttatcacataacttctgtatagctctaacagttaactgtgtatatttccccttataatttgttacaaaaagtaagtcttcatcttgagggcagttatatttactaggacgaaccttaatgtactcctgaatatcatctaagcaagagcgagtagctaatacggaagatctcttattacctttacgcgttacttttactttcccctggcggaagtttatgctagatatagtaagactagctacctcagaaactcgaagcccagtgcctaaaatgaggcttataatggctatgtctctttctttatcacgctgaaaaaaattatatttttttggtgatatatctttcaatatttcaccataatcatttgctagaaattgaagaaaagcaacatcatctttttcattaaatatcatgtttgcaacgtcatctgctcttgctgctgcatctactttctccttatgcagttcaattttctccattacattacgagagatgtaattttccccttgttcattctctgtatttagagctaagtacttgaatagggattttaaagcggagaaagttctgttaatagctcttgtctcaataccttctccctgtagatatctttgaaaagttctagcttcatttaatggtagattttctagtgttgaaattggtacatcacatatattagtgaccaccttaccgttttcgacggctaatcgattacttataagccattttagaaacttttcaaattcagtaatgtaagcatacaatgtagcgggggagagggctgttttcatttctgcatactctatgatatactagggcattttacttttatgcttatctattagtattttaaacttttctttttcttggttactcatgttgtacacatcaaatcaaataatgtaaattattttttaaactaatacttaaaccgatatttaaactaactattcggatttttgagctagaatgctattttaataaataacttgattacatatatggataccataatagtttttgaaaaagaagagaggtatcaatatataattgatacctctactatactcaattctatgaaatccatcaaactgttcgttaaatacacttttaacggatacattatatgagataattattgtaaattgaagaattattattacattctgtatgctattgaatagagaactggtgtatggttaaattcactttactgttaattctccaaattggtcatatagtaattttaaacgaatagaatgattttcttttaaaagctcataggcttcacgaagtaatttatgtcttttgttatagagtgtagaacatgtaaatgtgtttgaattacaacaaggacagacaatacccataatggccgtattaaaagcaataagagtattttgatctggatcaatcttacaaaataaacgaacagagttacctgtgtctggctttacaatgattgtgaccatgttatcttctttacgaatattcccattagaatccatctctaaagtggcatgtgttagtttcaattactttcactccttaatttttatgtattagtagaatttttggagtatctaaataaacaaagtttatatttagataagtgcgatttcttaagttcatacaattagtattataacatctatatcccatctgctagtgtacaaggacatgaatctctaaactattttgacaaaaaaatataaacttaatataaaaaaatcaattatctatagtaatctaatcttaattaagtaaaatctttaattcatacaaaaataatgctcagagtcatttaagaactttgagctttaaggagctgactgtggtgaaaaaataatataagagttaataaaaaagagtgcaaaacatgtctgcattcttttttattgcgccctagctacaataggtaaagtatttgtaataaagataggtgtatacatctataacttagatttgggctaatttctccatttttcaagcaaaggaaatatagagtttatttatgtgtatagtgagaattaaggtttagaatattctgtgtcaacattatcaatttactatagtttacaattatgtaaaaatagagatgattataatttttcgaaatagtatattaaaagctatcttaagggtaatgtgagcatttatagcctacttataaagtgggatcaagttcttgtagaattcactaaacaaaatgaggtgactgtaaattgagagaaattgcgaaaaaagtacaaatgatacgtttacaggaggagcatttcggaagtcatgcagacgcagaacagtattgtgccaagcggtgtaaaatagaacgagagagaattaaattagaaaaaaatatagttaaaaaacgaactcaaaaatttcaaacgacagaagaaaaatgggactcaaaatgtaaaaaagcagtacaattatttaatcaaggagaggaatatccaactattgcaaaaaaactgaggtgcaatgtgagtaatttgtatagagagctcaagaaacggggcgtattacaaatgccaaagcaagtagcatcatctaaatcattaaagtcatccataataccaccacaaacaaaaaaatcgaagttcgaacgatataaagagtattatatgtataaatagaagaattaaaggctactcgaaagttgcaaatatttacataatttacctgtaactaatggactttaaataaaaaatttaattaaaaatacaaattaataataattacatctaaaaaattttattcttagatgtatcacgaaatacactttttgaaatcacatttagctctcttctgaattaaacttattctccttttggcagaataaataaaaatacccaaataacaaaaatgtggattaaaaaaaataagagattttttagtgtttgcttctaaatgtccgctaatgtttaatgttacacggttctctgaaatttgttattcactctgtatattttataaccgttattcttaatataatattaaatgaattttttataaatggaaggggatatataatgttaactgaattacaacaaaagtttttcttaaagttaaaaattccaccaaaagaaaatgtgaattttgaagatttgcatacaattcttttacagatggggcacttattaccgtatgaaaacatagacatcatggaaggaaatatacaagaattttctagagaaactattgaagaaaaactacttttaaagaatcgtggaggattatgctatgagattaattctttattatattattttttgtgtgattgtggatttaatgtgtatcgaatagctggaaccctttatgattcgaaaataggaaagtggaacccggatgatggacacgcacttatcgttttacagcacaaaaatgaaaactatataatagatgctggttttgcatcctatcttcctttacatcctgttccttttcatggtgacagtgtgacttctgtaacgggagaatatcgtgttcgtaggcaaaatacagagaaagggacctatgtatttgaaatgaaaaaagggaaaaatggggaaacttctcattttcttgattcggatcttactgatacctggtctatcggctacgctttttatttaaatgcaattgatgaaaagaaaataaatgctatacaaaatatggttatagagcatctagaatcgccagtaaataaggggagtattatttgcaaattaattggaaacggtcatattgcacttactgagaaaagttttaccgaaactcggcacggaaagaagtctaaaaaagaaataacagtgaaacaatattatcaaatacttagagataaattcaatatatttttagacatatagcctgaagttaattgtaaaggttcaccatattatttcgcgaaaattgtatgtttctgcacacgttaatactgaacaaaaaattataggatttcgcttttttcgtgttcaaagctcttttaaacttacctatattcagataattaaatggaattaagttactaagaaaaagggaattttactatatttttaaagagtgaggttcctatacttgggcagattattgcaacggataaatttgccattcttatgatggttcatggcaagcaacaactagtctacaaaaaagcaatttccacaatcattaagtaattctttttcctttttttaaaggagggaaaaacaacaaaaaaaagaaggttgaaatcaaccttctttaaaataaaggaacagatgacagattactactccaactcttaatcaattataataaagttagtgcgaatattcaattcgttataaaatttcttaatatttatggcttattttcaaattataatatgagtaattctttttattaatatatgttcgatctttcctgttgcagaatgaacagctccctgtcaagtagacagtggaaataataaaaaacactttaagcggcttgaaccctgtattctaatgggcttaagccgtttaatttttcttggtaacgttcattattgtaaaactggatataattatctatcgcttgttgtaacgcttcaaatgtctcatacttatgtaggtaatacttttcacacttcaacgtcccccaaaacgattccattggtccattatctatacattttcctacacgtgacatgctatgaatcatttttgccttttctatctttctcttaaacccatgtgacgtatattgataccctcgatcactatgaatcaatggatgttcattctcttttaatatagtgatagcttgatccaatgtttgaaataccaatttattattgtttgaatgttccaatacataactaataatagacccatcataaagatctaaaatggcgcttaaatacgttttccttccgtttcctaatttgaactccgtgacatctgttacccatttttcattgggtttgcttgcagtaaattcacgatttagtcggttttcagcgacatattgcgcagttgagggaacatagcgctttcttttccgacgaatcacggactgtaatccagcaatgtgcattaagcgataaatgcgtttgtgattaaactttttatgatacattctattaatatttaatttcattcttcggtacccataaatgccttctactcgtgcataaatagcttgaatatccagaagaattgcttcattctctaattctctagctgttggcgtacgctgtagccatttataataagcagcacgagatacaccggcaatttcacataaaaggattactgccaaattttcatgcgcatgtaaatcttgaatcgctctatatttattttgtagacgaacgcttgttaacgacgcctcctttcgagttcttctaacttttttaaaaaagcattttctgcacgtaatcgttcattttctcgttctaaacgtttcatttccagtttaaacttttcttcagctgttaattcatattcttctttctttcgaccgcgtttatcttgtagtgcttcttcaccatttgcttcaaacttcttgacccattgatatacttgttgataagaaacttcataactttcggcagtgagctgatagtttttctgatgttgtatacagtaattcacaatttgaattcgttcttctaacgttgtttttcttctacttgtcatagagtttgtcattcctttaccggtatcatttagttctctatgactattatactttttaatccattttctcaaaaccgcagtactggatatattgtatttttggataatcttgtttaacgaatcgtgtcctgatagataatcattgacggctgctaactttagctcttttgagtaacgcttccaagaaagtgcttcttctaggccgtcttcaccattcacttcataccttcttttccaatctctaatcgtcccaggatcaacagaaaactttgccgtaatgtcagctattgaatgatgaccatctttataaagagctaaaatcgccaatttttcagctttagaatatttcattctagccataaaaaatactccccttagataacagatttttattttttatctgtctacctaatagggagcatatcagaatccttattataaggattctttttttgtcttacaaattcacaaatagaaaagataaaattggagagcatgaccttatctttttcataaggagaaaaaagaaaaaattgtttgtagagaataaaatagagattatacaaggatttaaatctaatgacaaagagttttctacttatctagaaattttaacgtatttcccgaaagaagtctccttcctcaagcgtgtgaagggcgtagcccgacgataggtgggagataaatttcggtttggcggagccaaaaggctttgctttttattttccctctgatagaatcagtcttataaagaatgaagattggtatatcaatgaaattagataataataataataatcattcggtgttcttgctatattatcaccttgtattggttgtgaaatatagaagaaatgtgttcaatgatgatatatcagactatgcaaaagatatgtttgtcaggttatcagagaattataacataacattggtagagtggaatcatgatgtagaccatgttcatattttgttcaaggctcatccgaatacagaaatgacaaaatttattaatgcttataaaagtgcaagttctcgactcatcaagagagactttccacgagtgaaaacaaaactttggaaagagatgttttggtcaagaagtttttgcttattaactactagcggttctccaataaacgtagtaaagaaatatattgaaaatcaaggtggaaagtgaggtgaaatgatatgacaaagcacaataaggcatataaattccgtttgtatccaacagaagaacaagcatatcttatgcgtaaaaccttcggttttgtacgttttgtgtataatagaatgttagctgaacgaaaagaagcgtacgaaaaatacaaagatgataaggaacaactaaagaaacaaaagcctccaactcccgcgaaatataaagcagaatttgagtggttaaaagaagtggattcattagctttggcaaatgctcaaataaacttgcaaactgcctataagaatttctttagtggtcaaaatgacttcccaacattcaaaagtaaaaaagacagaaagtcttatacaacgaatgtagtaaacggaaatattatgttgctaaatcgtcatatcaaattgccaaaattgaaaatggtacgtatcaaacaacatagagagataccacaaaattatagaatcaagtcatgtacgatttctatgactcctacgggtaaatactatgtgtccatcttgactgaatatgaaaaagaaattgtacaaaaagaagtagaaacagttgttggattagactttgcgatggatggattatacgttagttctgaggatgagaaagccaattatcctaatttctatcgtaacatgttagaccgattagcaaaggcacaacgagtattatcaaggcgcaataaaggttctgagcgttggcagaaacaacgtattcgtgtagctaaattacatgagaaagtagctaactaacgtaagaatttccttcatcatgagtctaaaaagttagctattcattttgatgtcgtagctattgaagatctaaacatgaaaggaatgtcgcaagcacttcattttggaaaaagtgtcgctgataatgggtggggtatgttcacttctttcttagcttataaactaaacgaacaaggaaaacaacttttgaaaatagacaaatggtttccttccaccaaaacatgtagcaattgtgggaatatgaaaaatatgactttgtctgaacgaatctattcttgtatatgcggtgtaaatctcgatagagattataacgcagctatcaatatcaaaaatgaagcaatacgactattagcgttaggataaatagcaataaaataacctttggaacaagggagttagctcggctgtctaaggacaaattcgttagctattaaaagtaatgattaaccgagaagcccccacttcaaacagtccgttaggacgttaagtggcgggtagttcacaagaattagatcaaaagtcattttctcataatagagtacataacggatgggcattactttttgatactttgtatgagcattggacgatgtggaaagggcctttttttgatggcgctcatagggagaagtatgtagaatttttaagtgtattagataaaataactgataacttgggcacagctgctgatgcatatgattataaaacattttatatgaggaaattaagatgtgagatgatccaattactattacatttcagccgaaaattaataatagtatagttcccagcatagatgatctaatcaagggaattgatgaaacaatattattatggaatgaattgaaaaatatggttaatgaacgttatgagcatgaacgatccaaacgttccagtttataaaagaagaaagtttttatgaattgctttttttatgtgattgctatcattttatagattttctgattcatattacgtcaaaaaaggtattgaaaatatttattctggatattttcaataccttttttctaatgtaggaaagaagttgggatttttgattttacttactaaaagtttattcttataaaaaagataaatattgataatatggcaatattattattaagtgtaatgaccttgaaaaatttaaatatatcttttaagaaataaaaaaagaacctacctaggttctttttttatagttggtaaatacgtaattaactatagatggtaataaagataatattttggatatctttaatcacttagctggtttctattggtagaatcctttttgctcacgtttcatagatacagaataaattttagcttactaaattggatgagttaacttctgagaatctttaagctgaattgtaaaaactagttagggacataatgaaaaagttggtttaactgagctcacagtatttttagcgatgaaatttcgttgaatatagtataagatatctcatattccattggacctatagcctattttcatgatttatccgtacaattttacgaggcataggcaaagaaatcctttacggcttattaccatctattgttcgactatgataatatcataacaataaagcgtttacaactgaaaaacaaagataatatatgaacattcgacttttttcgacatggattattttatgaaaatgcatcaaaaaatcaagaaaatatgtaatttccattacaaatctattatgttttgcttctaattgtgtaatttaactgtatatttatatgatttaagttatatatcctattcttttgagtgttaagttggaattgagttctttggccatttcttgaactacccccactttcacttcgtttagaagtgagggattcctaatcaattagagttctatcgaactctaattgattaggctaaccccgcagtccttgcggttagaagccttatcgcttcattctttagattgatacttgcgttaatatccctatcatgatgtgtacgacaagaaggacagtcccattcacgtaggtttagatttttaacgtctttattttgatatccacaacaagaacataattggctggaagcaaatgttttcgatacgacaatgacttgtttgccataccattttgctttgtattctaacatggatcgaaattgcgaccgtggaagtaattacagaaacagaagagtcagaagaagctgaagtaattgcggaagcagaagagtcagaagaagtagaagtaattacagaaacagaagagctagaagaagtagaagtaattgcggaaacagaagagctagaagaagtggaagtaattacagaaacagaagagtcagaagaagctgaagtaattgcggaagtagaagagtcagaagaagtggaagtaattgcggaagcagaagagtcagaagaagctgaagtaattgcagaaataaacgcgcctgtagtagagacatttgtagcacttgaggaaattcagcaagaagatgaagcaattgaacaaaagagtgaattcatacatgttgctgaggctgatgaacaaacgaagaaagatgttcaaagctttgcggatgttttaattgcagaagaacaaccagttgtagaagaagcgccagtcgtagaaaaacaaccagttgccgaggaaacactagtcgcagaagagcaacgagttgtagaagaagcgccagtcgcagaagagcaacaagttgtagaagaagcaccggtcgtagaagagcaatcagttgtagaagaagcgccagtcgtagaagaacaaccagttgccgaggaaacaccagtcgcagaagaacaaccagttgtacaaaaagaagaaccaaaacgtgagaaaaagcgtcatgtaccatttaatgttgttatgttgaaacaagatagaacacgattaatggaaagacatgcagctagagcaaatgcaatgcagccttctgctaatgtacgagtagagaataagccagtgcaacaagaggtagcagaaccacaagtggaagaacgcccagtgcagcaagtagcagcagaaccacaaatggaagagcacccagtgcagcaagtagtagcaaaaccacaagtggaagagcaaacaatgaagcaagtagtagcagagccacaagtggaagaacgcccagtgcagcaagtagtagcagaaccacaagtggaagagcacccagtgcagcaagtagtagcagagccacaagtggaagaacaaccaatacagcaagtagtggtagagcaagtacaaaagccaatttcaagtacggaagtacaagagaaagcatatgttgtaaatcaaagagagaacgatatgcgaaatgtattgcacacaccaccgacatacactgttccgccattagcgctgttgtcgattccacagcaatcagcgttagataatactgaatggttagaggagcagaaagaattattagatacaacgtttaataattttcacgttggagcacatgttattaatgtatcgcaaggtccggcagtcactcgttttgaggtgcagccagacccaggtgtgaaagtaaataaaattacaaatttaagtgatgatattaagttaagcttagctgcgaaagatattcgtattgaagcaccgattccagggaagagtgcgattggaattgaagttccaaataaagaaagtaagccagtatttcttcgtgaaattttaagaagtcctgtattcacaaagagtgaatcaccgcttactgttgcgctggggcttgatatttcaggggatccaattgtaacggatattcgaaaaatgccgcacggacttattgcgggggcgacgggttcaggtaaaagtgtgtgtattaacgcgattttaacgagtattttatataaagcgaaaccacatgaagtgaagttaatgttaatcgatccgaagatggttgagcttgcaccatacaattctgttccacatcttgtagcacctgttattacggatgtaaaagcagcgacagctgcattaaaatgggcagttgaggaaatggaacgccgttatgaattgtttgcgcatgctggtgctcgtgatttaactcgctacaatacgattgtaagtgagcgagaaattccaggagagacattaccttatatcgttattgtcattgacgagttagccgatttaatgatggtagcacctggtgatgttgaggaagcgatttgtcgtattgcgcaaaaagcacgtgcttgtggtattcatttattagtagcaacgcagcgtccatctgtagatgttattacaggtttaattaagtcaaatattccaacgcgtattgcgtttactgtatcatctcaagttgattcgcgtacgattattgatattgggggcgcggagaaattacttggccgtggtgatatgttattcttagggaacggtacatctaagccagttcgtgtacaaggtgtatatgtatcggatgatgagattgaaaaaacagttgatcatgtgaaaaagcaaatgaagccgaattatttatttaagcaagaggatttattagcgaaaacagaacaagctgagtcggaagacgaattgttccttgatgcatgtcaatttgttgtagaacaagggggagcgtccacatcttctgtacagcgaaaattccgcatcggttataatcgcgcggcacgtctcattgaagagatggaatcgcaaggaattatttctgaaggtagaggaacgaaaccgagagatgtccttatttctgaggacgaatttgccgctatgcaggaaacgaatgtatagtaaacggttttgctgtatactaagagaaaatgttggatagtaaagtagggagtaaagcgacatgaaagaaattgaattaaaattaaaaggtgaaataaatagactaacaaataaaacatttaaatttgacgaacgtgttggagaagggtggttctctgccgtttactttttaaagactagagaaatcatcgaagaatttcgcccgaaaagtgttgtaacgatgcaatttttccaaaaggaaaatgcagttctttgcggaacggatgaagtaattgcattgctacaaacattcgctaaaaatcctgaggaacttgagattaattctttaaaagatggcgataaaattagtccatttgaaacagtgttaacaattcatggtccttatgaaaatttcggatttttagaaggtgtcattgatgggattttagctcgtcgtacatcggttgcgacaaacgtatataacgttgtccaagctgcgcgtagcgtagataaagaaaaaccagttattttcatgggagatcgtgacgatcattatacacaacaagctggtgacggttatgcagcatacatcggaggtatgagcgcacaagcgacgcatgcgatgaatgaatggtggggcaaaagtggtatggggacgatgcctcacgcattaattcaaatgtttaatggtgatgttgtggaagcggcaaaagcatatcataagaaattcccagaagatgaattagttgtattaattgattacaacaatgatgtcattacagatgcacttcgcgtagcgcgtgaatttggatcaacattaaaaggtgtacgtgtagatacgtcccgcacgatgattgatcaatacttcattcgccacccagaagtacttggaacattcgatccacgtggtgtaaacccatcgcttgtattcgcacttcgtaaagcacttgatgaagaaggattccagcatgtagacatcgttgtaactggtggatttgatgagaagcgtattcgtgaatttgaagctcaaaacgtacctgttgacatatacggggtaggaagtagcttattaaaaatgaatattggctttactggtgataatgtagaattaaatgggaaaccagaagcaaaagctggtcgtaaatatcgtccaaacccacgtttagagcgtgttcaattagaaaaaagagaagagatgtaaaagagagaaaaactgataggtgattgaccctatcagtttttctgttatcatagtatagcggcttcttttttgctataatggacttgttatggacatataaagaagtacgtacgagtttatcctgataagtgaagggaaaaaataacttcactacatcaaaaatgtatgatgattaccaaaataagaaaagattcatatactgtcttatagataggccgttgtattagttcgaaatgttggaggttctttaagatgacagtttaccattttgtaggaattaaaggaacaggaatgagttcattagcgcaaattcttcatgatatgaagcatactgttcaagggtctgattatgaaaagcgtttctttacacaaacagcgttggaaaagcgtagtatctcgatccttccttttgataagaataatgtagaagaaggacaagtgattattgcaggaaatgcatttcctgatacgcatgaagaaatcgtagcagcaaaagaattaaacatcccagtccatcgttaccatcatttcttaggtgacctgatgagccaatacacaagtgttgctgtaactggtgcacacggaaaaacatcaacaacaggtttgttagcccatgtaatgcaaggtgcacacccgacatcttaccttattggagatggaacagggcatggggtagaaaatagtaagtattttgtatttgaagcttgtgagtatcgtcgtcatttcttgtcttataatccagactatgcaattatgacgaatattgattttgatcatccagattattttgcagacatcaatgatgtattcagtgcattccaagagatggcattgcaagtgaaaaaaggcattattgcatgtggagatgatgaagaacttcaaaaaattcaagcgaaagtacctgttattttctatggatttggagaagataatgatttccaagcacgcaacatccaaaagagaacagatggcacgatattcgatgtattcgttcgtaacacgtactatgatacgttcaaaattacaggatacggcaatcacagcgtattaaatgcgttagcagtaatcgcgctttgccattatgaaaatgttgatgtagaagcagtaaaacatcaattaacaacttttgaaggcgtaaaacgtcgctttaatgaaaagccgatgggagagcaagtaatcatcgatgactacgcacaccatccgacagagattaatgcaacgattgaagctgctcgtcaaaaacatccagagcgtgaaattgtcgctgtattccagccacacacattctcacgtacagaaaagttcttagatgagttcgcagaaagcctaagcaaagctgatcaagtatacttatgtgatattttcggatcagcgcgcgaaaataaaggtgaattaacaatcgaagatctgcaaaagcgtattgacggtgcagagctaattacagatacaacaacggatgtattaaagaaacataaaaacggcgttctaattttcatgggcgcaggtgacatccaaaaattcgaagcagcttacgtaaaagaagttcaagttgcagagaagtaatagaaaagacgcatagcttagctgtgcgtcttttttatgttgtcgtggttatgcattaatgttgaaacgtctatatatatggagttgtgttcgatatatttcaaaaatcgttgatatattggtacgcgttttgaaatataagtgttagaataataagaaaactaaaaaggggactaaaaaacatgttcacactccgagtagatgacgaaatcgaactacaattactagaaaaacatcataaagaggaattatatcaattattagatcaaaaccgtaatcatttacgaaaatggctcccttgggtagatgggacgaaatctgctgatgcttatgatgagatttttccgatgtggttaaagaaatttgcagagggagatggttttgaaagtggcatacgttacaaaggaaagctcgttgggatggtaggtattcatccagtgagctgggggaagaaagcgacgagtcttgggtattatcttgcagaagatgctggcgggaaaggtattatgacgcgtagtgtgaaggctgtacttcactatgcatttgagaatttaaaattaaataaaatggaaattagatgcggtgttgaaaatgtgaaaagccgcgctattccagaacgtttaggatttaagttagatggcattttaagagatgatgaatggctatatgatcattttcacgatatcgctgtatatagtttactagcttcagagtggaaggagattcgatgaacgagaagatacgcattattccgtatgaaagtacgtttcaagaggaagtagtagatcttatcgttcatattcagcaaaaagagtataatgtttcaattacgaaagaagagcaacctgatttacttgaaatagaaacattctatcaaaaggattacggaaacttttggatagcaatttatgatggtaaagtagttggaacagtagctttattagatattgagaatcatcaagtagcgttaagaaaaatgttcgtgaagaaagagtttcgcggaaaagaatggggcgcatcacatatgttgcttcaaacagcaatttcatgggctgaggataaaaaattgaaagatatttacttaggaacaacagtaaaatttttagcggcacatcgtttttatgaaaagaatggttttgaaagtgtgagtatagacgagttgccgaaaaactttccggtgctacaggtagataagaaattttataggtacattgtgaaaaaggtcatttagaaatggcctttttctatgaagcaaaatggaaatagtggtataatttgggttagggggtgtaggtatgaactttccaattcaaagaagtaagtcagtagtcattttcgtttgtcttacgttagcgtttatgtttatatatccaattgtcatgcttttcaccaataaagcgcattggatgtcagcgttgattgggatgggtttatgcttcattgtaaatgtaccactcgtttgggaagtatttattaaaaaacataaagtagaaaatggcgtattaaagtacggtattttaaatgatgatattgtattaaaagatgtgagaattatacgtcaggtcggaaagtctcttgaaattacgacgaatgcatataaagtacatatggttgcgatgccgcaaaatatggatgaattcttggggcttatagagaaagaaaatccacatgtgaaaatagaaatggtaggaaagaaataaaaacgctcggcgaaaattccgagcgtttttattattattttaagttctctgggtttaaagcttctagttcaggtacaacgaagcgtccgtctttacggattagtacgtcgtcgaagtaaatttcgccgccgccgtattcagggcgttggatgcatactaaatcccagtggatgttcgagttgttgccgttccatgcatcgtcgtaagcttgtccaggagtgaagtggaagctgccatcgattttttcatcgaataggatgtctcccattggatgtaagatgtatgggtttacgccaattgcgaactcaccaacgtagcgtgcgccttcgtctgtatcgaagattttgttaatgcgctctgtatcgtttgcagttgcttcaacgatttgaccgttctcaaacttaagttgtacattttcaaatgtataaccgttgtaaggagatggtgtgttgtaagaaactgtaccgttaacagaatcacgaactggtgcagagtatacttcaccgtctggaatgtttaaatgacctgagcatttaattgctggaatgtctttaatagagaatgttaagtcagttccaggaccagttaaacgaactttatctgttttattcattaatgtaacaaggctatccattgccttatccattttaccgtagtctaagttacatacttcgaagtagaagtcttcgaaagcttctgtactcattttagcaagctgtgccatagaagcatttgggtagcgaagaacaacccagcgtgtttttggaacgcgaatgtctctatgaacttttttaccaactgtttggccatgaactttcatacgctcacttggaacgtcagcttgttcattaatattatcaccagagcgaaggccgatataagcgtccatgtctttcattacgcttgcttcatatgcagcgatttgttcgaaatgttcttcagtagcacccattaataaagagcgatctacttgatgatcttttaaagagacgaatgggaaaccaccagctgcatatgcttcttttacaagtgcagttacaagttctttttgtaagccaaagttttcaattaatactttttcacctttttgtaagcggatagagtagttaattaaattgtatgctaacttttcaatacgtggatctttcatatgtaaagcctccctactaattatgtatcctctcctattgtaacctacttagtggaatttgttgaatgatttatgttacagttaacgaataagtatgaaaattctaatgatgagatagggattagaatgaaacggaaaatgattgtataataggggaaagtatgaaaaagataaaggaagtgatgaaatgcaagttcttttatatgtaagtgcggctattatcgcggttgctttcgcagtattagtagtgtatgtatgcagaacgttgttatcggttcagaagacgttggaaaacgttgcaagcacgttagaaggtttagaaaagcaaatgcaaggaattagcgtagagacagagcaattattacataaaacgaatgcgttagctgatgatattcaacagaagtcacagtcattaaataaagtggtagcgggtgtagatgggattggaacgacaatccaatctttaaatacgaagcttcgtaatgtatcggactctgtaacggacgaaattgaaaataacgctgataaagtagcgcaagttgtacagtggagcagtgcggcgattgaagtatacaatcattaccgtgcgtcgagacaagagaagaaggttgaaaaagaagagcgtaaattagaaagaattgagaaaaaagctgaaaagaaagagaagcgctctagatttcgtatgagaggtgaatcgtgatgaatatgacaaaacttgaaacaattgaagagcttgaagtcttagtagaaaagaacgagccgtatgttctttttaaacatagtacgacatgcccgattagtcacggtgcatacacagaatttcaagcgtattgcagcgaagaaagagaagtgccagcgtattacttatacgtacaagatgcgagagatgtgtcaaatcgtgttgcagaacaatacagtattagacatgaatcaccgcaagtgctatacataaaagatgggatggtagtatggaatacatctcattggaatattaaaaaagatgctttagaagagaatataaagtaaaaagaagcaagctaaaggtgcttgcttcttttttttgtttttgttgaaatatatttagtggtacactattaatagttcaaactaaataactagattgttgaaagtaggttttaagtaatgaagaaaatggcattatccttcgcagtcgtaagtttattactgggagcttgtagtaacaatagtaatacgattagtaagaaggatgaagttatacaaaaagatacaaaagaaaaaagtatgattccgagaactgctgtttctaaagattattatagaactgttattcctttaaaagaacaaaaggttattaatacagctaatataaaaacaaattctaaattagatttagcagagtatgaaaatggtttaataaatattgcaacgcagcaatttgatacagagagtcacgtactgcaattaaaccagtatattccagagaaactaattgatgaactagttgcgaaagtagaagcgccagttttgacgaatattatagaacaagactatttcggaaaacagaattcaaatgaactaagtttatctggtgttatgattggcttagctatgtcttcaagtgtatcgaatgaagaagctatgtctaaagggtctgaagttgctaaacaacttattgaagctattaacaaaaatgataagtataacaaatctccaattacgtttgctatctttaagcaagaaagtactagttctttaaaaaatggtacgtatattgctagtgctactgttcaaaagaatgatacgaaccttggaaattggagtacaattgatgaaaagtcgtattcatatccttctgatgaatttacacaagcacatggagaagataatacaaaaataaataactttgctaaggaaataaaaggtttttctaatggagattttattccagtcaacgctaaagtttcttataagaaagatcaaatggatacattaaatatgaatattgttattaaatataacggtaaaacagaattaatggctcttacccaattggctgcgcaaggtatgttagacaaattgcctaaagatgcgaaagtacaattacagatcaagtccgaaagtaaaatcgaggctgtgattataaaagagaaaaacagtgataaaccgtttgtttccttcttgtaaaaaagacagtatgtaaactgtctttttttattttaaatgaaaatatacaacgttttttgatggtaattcattgctgtatatcgtgtgacaatcgtatatgtatcagctataataagttatcttaaaaaagtaacatataggaatttgaaagaggtggctttcttatggcatcacaacaattaggtcgtttacgttctgaaattgatcaacttaatttacaaatattagagttactaaacgaaagaggtcgtctcgtacaagaagttggtaatttaaaagaagtacaaggtgtgaaacgttttgatcctgtacgtgaaagaaatatgctggatttaattgcagagaataataatggtccatttgaaacttcgactttacaacatattttcaaacaaatttttcaagctggtttagaattacaagaagatgatcatcgtaaagcattacttgtttctcgtaagaaaaaaacagaagatacgattgttgaaattaaaggtgaaaaaattggtgacggaaatcagcattttattatgggaccgtgtgcagtggaaagttatgaacaagtacgtcaagttgctgaagcaatgaaagagcaaggtctgaaattaatgcgtggtggtgcgttcaaaccacgtacttcaccgtatgattttcaaggtcttgggttagagggattacaaattttgcgccaggtagcagatgaatatgatttggctgttattagtgaaattttaaatccgaatgatattgagatgtcattagattacgttgatgttattcaaattggtgctcgcaatatgcaaaactttgatttgctaagggcagctggtgctgtaaataaaccagtattattaaaacgtggtctatcagcaacgattgaagaattcattaatgcggcagaatatattatggcaaagggaaatgggaacattattttatgtgaacgaggtattcgcacgtatgaaagagcgacgcgtaatacgcttgatatttccgctgtgccgattttaaagaaagaaacacatttacctgtcgttgtcgatgtaacgcattctacagggcgacgtgaccttctcttaccaactgcaaaagcagcgatggcaattggtgcagatgcaattatggctgaagtacatccagatccagctgtagctttatcagatgcggcgcagcaaatgaatataccgcagttcaatgattttatgaatgaattaaaatcatttggaagtaaattataaaaacttttaatgagctgttccaaaaagggattttggaacagctttctcttattgtatagcgactgtcattgtcgatttttgttggtaagttgatatatttaaaaaatcgctgatataattagagttgcggtcgatatatttggaaaatcgctgatatatttcgagttacagtcgatatattcgaaaaatcgccgatataaatttcatttactatcgtactgcttaaaataagatttctacttaggaaacatctatttttttacaaaaaatgcccttttttcataaaaaatacgaaaatacgagaaaagaagcgaattttttcgaaacttttgcgggaaaatattgtatgagcctgcgtttttatcgtatcattagtaaaaggaagaactcgggacgattggtggcatctgcaaatagagttgatgtctttttttcattcaagtaaccgatacataaaaatagataacaaaaatagaaggagtgtgcgatgagatgaacgtaacaatctatgatgtagcgcgcgaagcaaacgtttcaatggctaccgtatctcgtgttgtgaacggtaacccaaatgtaaagcctacaacaagaaagaaagtattagaagcaattgatcgtttaggataccgcccgaatgcggtagcacgtggactagcaagtaagaagacaactacagtaggtgttattattcctgatatctcaaatacgttttatgcagaacttgcacgtggaattgaagatatcgcaacaatgtacaaatataacatcattttaagtaactctgatcaaaacaaagagaaagagttccatttattaaatacgatgcttggaaaacaagtggacggaattgttttcatgggtgaagatattacagacattcacattgaagaatttaaaaaatctccagtaccaattgtattagcagcgtcatttgatgagcaaaatgaaacgccatcagtaaatattgattatacacaagcagcttatgatgcaatgaagcactttatcgagcaaggacataaacgtatcggtttcgtctctggtcctttcattgataaagcgggaagtgcgaagaagttacaaggttataaaaaagctttagaagaagctggtatttcatatgatgaaaatcttgtaatcgatggagattacacatatgactcaggtatcgaagcattcgaaaagctttggagcaatgatgaaaagccaacagcaatcttcgtatcttctgatgaaatggcactaggtgtaatccatgcagcacaagacgctggattaaacgtaccaactgacgtagaagtacttggtttcgataacacacgtcttgcattaatggttcgtccgcagctttcaacagttgttcaaccgatgtatgatatcggtgcagtagcaatgcgtctattaacaaagtatatgaacaaagaaaaagtggaagatcacactgttatcttacctcaccgtatccaatttagagattcaacgaagtaagtataaaaaagctcacagcgattgctgtgagcttttattcgtattcaggatagtatttttgtacgactgcatttaccatttcgtctttcttaacgtgtaaaaatcttgcgtacagttcttttccggtttcaaatggtgtatcgtctaattcaaacacatgcaacacttttcggaacttccacgttatttgctcaccgtacatattatcgtacgtatcttcagattgcatagcaatttttttaccaagttcgtgagcatcttctaaattgtttgctttaacaagaataatactttcttcaaaaagtgtatcgtgattctcttcataatgctcatcaattttcgtaggatcaggctcactacaatgaacagattcaaacaataattttacagcgtacatattatgctgcatgtttcactttataaataatacttgcgacaagcgaagcaggtattgtaaatacgttactttgataatggtaatgtacttgggattcttcataagacatgttatcatatagttcgttttgtgagacactcaattttttctgtttttctttgagcattttaatgtagttgtactgtattgggacgagaatgatgaaataagctaatacgattagtgaaatccaaatcattatgaacactcccttacaaagaatatttctctataacaattatatcaataaaaagaaaaaataaccatttttagtggggctaattttcttctaaaaatgcgaacagttccttttggttttttaaattgcgatcaatacatgttcgagcaacatatttcaatccttgtaataatgcatctacgtgcaaagtatcataatgaattatatttccctctaccatcgtttcgtctttttgcaagttaattgatatttttagtacagttatattactttgtaaatttacaacttctatgtaaaaaaactgtttgtctaagtcaatcgtaacataatcgaatcgttcggatagctctaatttacatgtagtagtatagtccaaatgaaagcctccttattgtataagtgtatgttataatgccttcgctatagatggggctattccttgttatatgtcacataagtgcaaatttaactattatagggcaatgtcatgtataatagaaagaaaaggcttgtgaggggggaaaagagatgatcgttctttggataattacgctttgtatgactgctatttttgcatatatgacgttaaaacaaaatggtttaaagcgatttgttccaggaagtattcttgcaggaattgcccttatcacgtatgtaatttctatttttattgaaagtgtatcagtagatatgagcacaagtttaatgtttattggtattacactatttgcaggtagcattatggtacttatggttgctggtattattttatttattcatatgaattcggaaacgttatagcatatagaaaaggcatgtcccgagggacatgcctttttatccgttcaattatgctctatctttagaagagttttgctgttttagtaagtcgcgaatttcgccaagaagaacttcttcttttgttggttctggaatttcttcctctttttcttcttcttcttttttagatgttagtttgttgaaaactttaacaaacataaagatagaagctgcgataattaagaagtcaaaaattgtttggatgaagttaccatacataacagcagatttaccgtatccaaagtgtaaatctgtaaagtcaacgccacctaataccataccaagtaatggtgtgatgatatcttttactaaagaactaacgattttaccgaatgcagcaccgattacaaccccgacagctaaatcaacgacattccctttgaaagcgaattttttaaactcgttccacatgtgttaatcccatcctttccacgattcattatgaaatttataattcctatcaacatattctatagaaatttacgagagaaataaagagggaatgggaatgaaagtaaattctgaaaaatgtatctgttttaatttttgtttacatcatctagtaaagattgtagcatttgctgtgtttttaatccttctaatccatctacaacgggctttgtatcgccttgtacacactcaataaaatgatgaacagcatcttcaaaaccacgttgttttaacgtcgtatcccatgatggggaaccactttgtgaaactgagttttcctgttcaatttcaaatgtattcatattttttacgcgaatgattttccctggcgttacaagttcaatttgttctaaattagtaccggcatggcgatgcattgcagtagaaagtaacagtccacttggagttgtatatgtatgatgtccgtaaagaagttcattcttttcattgatttgcatcatattgtgaacggcgttaaggtcatcattagctaaccagcgagcggtatctacaatgtgtaaataatcatctaacatagtgaagtcgtacgtatatggcccgactttatttgtacgatgcttttcaattcgaatccatgaaatatcattagcctgttctttggcagcgacatacataggaacgaatctgcgattaaatccgaccattaattttcggttatacttctcgctcaactcgactagttgctcagcttgttccactgtagctgctagcggtttatcaacataaacgtcgatccctttttttagaagttcagaaacgatttcataatgcgatgcagttgaactatgaacgaagattgcatcgcattccgaagctaacatttcaatagaatgaaagtcttgaattcggtattgctggcaaacttgttttcttttctctgcattaggtgtaaacgcccctacaaaattccaatcagtttcttttgtaagtgttggaagataggccttttgcgcaatacttccaagtccaatcattccgattttaggtatattcattttatctccgccttattattcaatatttatatgccggaataaatgtagcataggatagctgagaatggcaaaaatgaagaatctatattgagagattctttatatcatagtaagttcgctgtcgcttaataatttgtgtagcattttttcttgattttgtttagctgttttattccctgttttagcgtataaggaaattaaatggtgatacgtattttcttcaaatggattcatagattgcatacgcatgcaaatatcaattgcttcagtgtaactcgcgccttctatataaaaacgaataagggaaaaggcgtgttgaaaatataagttttgtaatcttgttctttctccttcgctccaccaatagtccatatcaataaggtaatctccagtatataaagagaggcatgcaatgtatttatctaatgtatcgctacatatttcttttggaagagcggctgctgcttgttcgaatagatcaacatcaatcaaaatgttttgtaaatcgagtttatatccgtcattcactcgagtaatgtttacattcatttcgtaagcatggatggttcttcgaatttgatatatggctgaatgtagatttactcttgcttgttctaaatcagtatttgaccagagtaattcaattaaagtatctctattaataactttatttcgattatgaactaaaaataaaaatagttctttcgctttttttgtgcgccatttttctagggggatttttttgtctttttcatgatctacataatataactcaccaaggcaattgagtatcgaagtttctattgtagaggaattagttgtttcaatcgtcatgctttgcataagacgttgaatagtgttatgcaatctttccctcgtaataggtttcataatgtaatccaatgcataaatttcaaatgcttcaaccgcataacggtcgtgtcctgtaatgaaaactatttttatatttttatgttttgattgtagttcgcgggctaacataacgccatttttttcaggtatctcaatatcaagaaatgcgacatcaattgtatgatctttactataaaaactaagagattcacaatcatcaaagcaaacgatatctttaaaaatttgaagttcttttaacatcttttcaagtctttggagtattaatggttcatcatcaacaataattgccctcatagttcattacctctttcttacaatcttgtttaatgatttaactcaagtcatatcaccaataaatatttagacaaaataggacatttttcattcctccataaataaccataaatattacatggtaattatttgtaattactattataaatgattcttattaattgttatatacgataaattatttaaatatttctattttttgattttttgttcagtttttgttcagtgtcccaatttatactttgagcgtaaaagtaatttagcgaaaaagggggaaatgaggcgagataaatttatgttaagtgagaggatggaacgatgaagaagaacgtcacattatttatgttgcttctactcgtatttcaagtgattagcccagggataatagcggttgctgctaatacggtggaagcggtgcagcataaggtaacaactaaatcgacagggaatatgtgtttaagggagcatgaaggggagctaatttttaagtggccagcaccaaaacaaaagaaagttgattttgttattgtgcaagatgcaagtggaagtttcaaaggcacaatgccaaatgtgaaaaaagcattgagcaatatcgtagatgaactaaatcctgcgacggatcggattatggtaacgagttatcaagattataagggatataaagctagtgacggtcgtgtacttgaaagtagaggtaatgggattaaaacaaccttgcaagcaggattaactaataactttacctcagcaaagaatggcatcaataaaataactccagatagcggtacaccaactgccagtggtcttcagtttgcgttagctgagtatgagaaagcgaagggacaaaatgatccagaccgagaaacagtttttctgcttgttacagatggtgttgctaacattcgaaaggatggctatatttacaaattaacaaatcaactaacggatcagggcacaggttataggtcgaatgaatatgggcaagattatgtaggtgctttgaaggaagtaactacagaggctcaaaatataaaaaacgcgggatataaacttgttacagctttttgggaagataaaagtatactagcagcatctgaccaatattatactaagtacgataaagaagtaggtccatatgcaaggcaagagttaaaaaagatggcaacaaaaccggaatggtttgtactggcaaatgatattgaagagtttacaaaaaatttaattgaaaccgttacaaaagtgacaaaaaaagaaaaagataagttgattttaaatattaataatgatttgctcgtaacaggtgtgcaagggtctggtccaaatggtgttaatacaaagcctgttatacaagggaatcagatcatttgggatttagacggacagccagaaggaacgtataaagtcacttataaggtgaaggaaaaaacaccgcaatcgaaagaatttaatgttgcggatggatattttatgttctttgatcaaaagtttgatattcaagccgtcaaggcacttccgaatgaaaatgctactaagtgtaatacggcggtaacgaaaaaagtttctgattcagatcaaaaactggtcgatgaggcattgttaaattcattgcatgaagaatttgtatatgatgtcaattacaactttggatttgatatggagtcaaaacaagaaatcgttatacaagatgatttggaagatattttagaagttttagagacgaaattagtaaatgaaaaaggcgaagttgtaaatatagcgccagttatagataaagaaaagtcaattgtaacgtataagttgccaaagcaaaatgattcgtacgcgtatttagctggtggacaatatcgattaacgattaaagcgaagataaagattggtacaaatatcgatgtgatcaaagggtacctagataaaggtggcgttccgaatacggcaaagctcattatagataacaatccagttgtttctaataaagtcattgtgaagccaccaattgaagaaccgaaattacgcaagactgtatcggatgatgatgaaaagaacgtggaaaaggctacattatccaatgtaaaagagaagtttgtttggaatgtgcagtatgaatttggaagttcaccaagtggatacgattctatcgtattacaagatgatttagaagatgttttagacatattagatgtgaaggtcatcaataaaaaaggtgaagtcgtaaatataaaacccaaaattgatactgctaagaaacaggtaatgattgaagtaccgaagcaagaaggaagttatgtgtatttaacaggtgaagtatatacggtgcaaattacatctaaaattgctgatggtgtaaatcaatcagaattagcacgttatatagtaaaaggtggaatcccaaatacagcagagttagtactaaataataagtcagtgaaatctaacgaagtgtatgtggttcctccgaaggaaaaaccgaaagtaacaaaaaccgtttctactcaaaatgagaaagaagtggaaaagggtacattgcaagagagaaatgaagagtttacttggaatgtagcatatcaatttggtaatgatacagcaaatttagagaaggttaccttacaagatgacttagaggatattctagatattttagatgtgaagcttatgaatgaaaaaggtgaagttgtaaaagtaacaccgaacattgataagcaaacaaagaaagtgacaattgagttagagaagaaagatggttcatatgcgtatttagctggtttaaagtacacgatgcatattaaaagcaaaatagcagaaggtacaccagtagaggtgttagcgaaatatattgcaaatggcggcgtgccaaatatagcagagctcatatttgataatacgccaattagttcgaataaagtagttgttattccgccatctataggtaagatcgaaattgaaaaggtagatgcagctgatgaaaatattaagttgcaacatgcggaatttcaagtttttaaccaagaaggaaaagaagttggaaagttaattacagatgaaaatggcaaggctagcttagagaaactaccgtttggaaaatatacgattaaagaagtgaaagcgccgaatggatatatgttgctccgtgatccaattgaggtcgaggtaacggcagcgacacctacacaaacgttaaaagtagaaaacaaaaaaagcgagtgggaaattccaaacacaggcggtgctggaacaaatgtattttatttaattggtacttttttaatgattgtagttgtatttttgtttttccataagagaaatagtaattactagaatattaaattggtagaagaggagaacgagaaatgaaaaaatttttaagtatgtttttaatctttttgctagcatttgcttcattgccaagtatgttaataaaagcggaatcgaaaagtgaaaaaaaaggcacgttaacaatccataaatttgaacaagagccgcttaataatccagctttaaaagaaagtagctctaaaggagtagaaattcctaaagatgcgaagcctttagcaggagttgtgtatcaaattaaacaagttgaatcatttggaacaatttcaaacgatgggaaaattgttaaagaagacatcaaaccagtaaatggagttccaattgaagttgaaacgaatgcggatgggattgcattttttggcgatttaccactaggtcgttacgaagtgaaagaaatttctggaccaccacatgtaaatatagacacaaaaacatacaaagttgatatcccgatgacaagtgaagatgggaaagtattaacatatgatgttaaaatttatccgaaaaatgaaacgaaacgtggtgcagtagaattaacaaaaattggtgtggaaaataaagcgttaaagggtgttcaattctctttatataaagaagatggaacagagttagaaaaaggtttggagacagatggaaatggtaaaattcgtgtcggtaacttatcgtacgggaagtattactttttagaaacgaaagcgctagatggttatgtgttggatccgaaaaaatatgaattcttcattaaagaatctggtgtaattaataaagatggtacagttacttctggtgaagtagttaaagttgatgtgaaaaactatgaagaaccaacaattgataagaagattaatggagatttaaacaatttaccaattaatacgaagacggattataactatgatattaaaacactaattccagaagatattaaggattataaatattatgtcgtaacagatgtattagatagtcgattagaaattcaagatcaaccagttgtaaaaattgatggtaaagtagtagatgcaagtgttgtagaagtagttgtagacggtcaaaaagtaacggctactgtaaaagatttctctaaattagataacaaaaaagagtttcatttgcaaattaaagcacaaattagagatggcgtagaaacaggagtagagattccgaatacggcaacaattacatttaaaaacaaagatgatgtaacaggtgagaaggcaacaaaaccagttatcgttactccaacgactggtggtattacattaacgaaagttgatgggaaggatggtaagaaattagaaggtgcagaatttgcgctgcaagatacaaaaggaaatccagtagaaatcgatggaaagaaagtagtaggtacatctgataaaaatggtgtaattacatggaataagctaccttacggtgagtatcaagttgtggaaacgaaagctccaacttatgaaaaagaagatggtacaacaggtagttatcaacaattaagagagccaattcatgtaaagattgatgctgatcataaaacagttacacttactgtagaaaataataagagtggatggattttaccttcaacaggtggtatcggtacaatcttatttactgtagtaggtcttgtattaatgataatagcagcatttgttttctttagaaaaaaagcaacaaataattaataagcgatttaaacggtaatgaaaagaggagagggaggcctttcctctttttcggcattttagcccgttatttgagggctaacaatcagtggggtgaacaaaacctacactgattaaagtttcactttataggaggatatgatgaaacgtaacattatatttggtgctatttttttattgggactttgtattttcttatatccaacagttagtaattggttagcaacacgagctcattattcagcggttagttcgtatgataaaaaagtaaaagagttacagcaaaaagaaattgaacgtaggaagaaagaagcgaatgaatataataaaaatgtccagacgacgtcacagtcattttcggatccatttaatgaaaaagggggcgacgagagtggacgttcatatgcagatgtattaaatgtaggtgagagtatggggtatattgaaattcctacaattgatgtaaagcttccaatttatgctggcacatctgaaaatgttttgagccgaggagtaggacatattaatgcttcttctttgccagtagggggagaaagtacgcatgctgttttaacggggcatcgtggtttgccttctgctttattatttacggacttggataaggtgaagaagggagatactttttacatacattcattaaataaagtgcttgcttataaggtggatcaaataaaagttgtattaccaaatgaaacaaatgatttattagttgtgaaaaataaagattacgttacgttagttacatgcacaccttatggagtaaatacacatagattgatagttcgaggggaacgggttccttttgaagtggaagaaaaggaagcagttgtggctcaagtgaatccatttgtagtagaaaagtggatgattggaatagtaatcgttctattatttttcattggaatgtttctttattttaaagtgaaaaaacgttaaagtacgagtgatggaaatatttttagaatatagttattattcactcgataaagaaagtgtgatatgttatggtaaagatttgaaaagattccgtaattttataaagagggaataagtatgtctaaaagaaaaatattgatagtagtattcttatttatcctttgtattgtcggttttcgttccatttggtttaaacaatctctttatataaatcaaccacatgctgaagaagggatagtaaatttatcagatataacatttggcgaaaaaaatttagttacgttaaatggtgaatggaaattttatccgaatgttttacttaccccggatcaaatgaaggaaaataataaagattatgaatatattaatgttccggggaactggaaagaaagagttgatcgtactcatcaaaaagaatatggcacatatgcgctatctatcaaagtgaagaattcgaatgaaaattacggcttaaaaatacagcgtgttcataatcagttcgatttgtatgtaaatggagaacttgtacaggaaagaggaagtatttttaaaccgaatgatgtacataaaacttcacttacaccaactgtcataaaggtaaaagcgaatgaacaaggggtaattaatcttcttattcctgttacgaaaacgacacaagaatcgaaacatggcgggattacaggtggagtgcgttttggcagtgaaaatgctattgtacaggatagctttaacaatcttatgatgcaaattattgcaacgacaatagtgtttttacatggtatatatgcatttatcatttttgtgatgaagccgaaaaatgttgagattctatatttttcacttggtagtatatttgcaggtattatatttttaattacggatgaacgttttttgttctctttgtatgaatttgaattttcaacatatatgaaaattatatatacatcgtttgtaggtttcgctttatttattttactgtatatgaaaaggtttttacgaggttatggggacaataaatttattttatttaccatcgtattatgtggaatttatgttttcgtagtattgttttcttcacctagactagtgcaagattttggatttatattattttttacaattattattccattcattttaacagcaattattgttttacgagtggtggaaagtggaaagtatgatttaatctttttactttttacagtgattagtgctacttctggagtattgtgtgcgagttttaaagagtttgcgttcatgtatagcatagggtttgcgaggatatttgatgcggatttttatccatttgatatttttttagcaatggtatcattttcgactttttggtttatccgattctttcgcacgagtgatgagaatagtgaactggttggaaaattaaaagaagagcatcataagaaagatcaatttttagcaaatacagcgcacgaacttagaaatccgttacatgggatgatgaatattgcacaaagtgtaatggatgaagagaaagcgataaatggtgaaagtaaacaacatctaaaactattaatgacaataggaaggcgtatgtcgtatttgttgaacgatttaatagatgttacaagaatggagcagaaagggataccgattcataagagaccggttgatttgcaaccaattattacaatggtgattgatatgcaaaagtttattggagaagaaaagaaattacaaattatcgcgaatatccctgaacggtttccatttgtattagctgaccaaaatcgtcttattcaaattttatttaacctacttcataatgcagttaaatttacggatgaaggggctattacaattgatgttgaaaaacgaaaaaattacgcggctattcaggttacagatactggtattggaattgataaagaagcgcaaaagcgaatcttccttccatatgaacaaggtagtgattcatatggtgaaagtggaggatttggacttgggctaagtatttgtaaacaattagtggaaatgcacgggggaacacttactgttacatccgttttacacaaaggctctacttttacattcacattaccacttgctgaaagagaagagatgctaattgtgtcaaaagaaacaattgaaaaagtagtggaattaaaacaagttgaaatgaaggataatcgagtcggtaatagaaggagaattcttgctgttgatgatgatcctataaatttaaaagtattaaagagtatattaccacaagatgaatatgaacttgaaacggtaacaaccggaagagaggttttggagcggttaaatatggagtgggatatgatattagtagatgtgatgatgccgaaaatgtcaggttatgaattaacaaaaatgattcgtacccaatactctattgcagagttgcctattgtactgttaaccgctaggtcgcagccagaagatatttatacaggatttcttgctggggcgaatgattacattgtaaagcctatagatgcactggaattaaaagtgagaattaatgcattaacagagttaaagcaatcaattcatgagcgaataagaatggaaggtgcttggcttcaggcgcaaattcagccgcattttctgtttaatacactaaatacgattgctgcattaggtgaaattgatattgttaggatggagaaattaattgttgagtttggaacgtatttaagagccagttttggtgaagaagtgttagcggaaaccgtacctatacagcatgaattagatttacttcaatcatacctttatattgaaagagagcgatttggaaagagaatacagagcgtgctggaagtcgaagatggaatagaatgtgtagtaccaccgttttctattcaaacattagtagagaatgctgtgcgtcatggtatattaaaaaaagcaaagggtggaagcattcatataaaaatagagagtgtgagtggatttataaacatttcgattgcggatgatgggataggcatgtcagatgaaaaaataaaagaaatattagtgaaaaaaccgaatcaaaaacagggaataggtttattgaatacggatgcacgattaaaacagttatacggaactggattagaaataaaaagtgaacttggaaaaggaacgattgtttcattccagcttcctgttgttatggataaataaggttgttaaaaaatccgaagtgatgagcgcttcggattttttagtacattttttacttattcccctctaacaaaatcttctctatctcctcaaagtgatgagtgcgagcatgctctagcggggtaacaccatcattgtctggaatatttacatctgcaccgtgctcaataagaaggcgaatgacttgttgctgtgtttcgtttccgttacttagtactatggcttccattaaagctgtccatcccaggttatttacatgatttacatcaatatttgttcgagtgaggagttcttttataacgtcaatatagccatgttctgaggctgggataagagctgttccgccgtaacgatttgtaatcgtaggatctgcaccagcatcaattgttaattttaaaatgtctaagtaaccttccgcaccggcgtatagaaagggattatttttcatgtcatcttggatatttacgtcagcaccagcttcgataagtgcctttgcggtttttacatcatttttgtatgtagcaatcataagcggagtgcgtccttgactatccgtcgcatttatatttgcgccttgttttagtaaagatataacagtattcgtttcatttttttcagtggctgctagtagtgcagtctccatgtttatcatctccttttttacttcttgttcttgcgagcatccttgtaaaaaaattacgcaacatatcatactgaatgtttttttgaacatggaatttcaacctcctaatttcaactgtaaaataggaacattaaatttttataaactgacgctaaaattactataaaatcgcttgagtaattgaacatatatttttatgcttataaataataaggtttgataaagtgaggatttaagatatgtctattaaaacaaggtttttattttcttatattgctgttatcctcgtttccattacgcttatattagtcgcgggatttttaatcgttttttcgataacaggtgacttggaagcagtgaaaaatttctataaaagttcttacattcaaaagccgcttacaccagaagaagagaatgcctatcttgagttgaagtcagcagccaaacagcatcaatctcaattgctagatgagtcgtttgtctcagcaatagaaaaagagggtgtgaaaatagtagtaagaaaaggagaaacactttcatatgcttcaaacgtatttgaaagtgtatctttaaaagaagcccttccgaaatttgaatcagcaaatattaatagtcgtggtacaacggaactaggcgatacattttatcgatatgtaaagtttgatttttattttcctcaggaagaagagggaagtatatttgtattaaaaaagcaaagttcatttgtagatcttacacaaaaattatttccaatcttattcgtatcgcttttactactagccattttactcattggattattaagttacctcgtttcaagaagtgtaataaaaccaatttttgtattgaaaggcgcaacggagaaaattaaagaaggaaatttagattttcaaataccaattacatcacacgacgaaatagggcaattaaatcaagggtttgaggaaatgaggaagagattaaaagaatcgatagagatgcaaacacagtatgaagaaaatcgaaaagagcttatttcaaacatctctcatgacttaaaaacaccgattacatcaattataggatatgtagaaggaataaaggacggggtagcaaatacgccagaaaaaatggataagtatttaacaactatccatacgaaggcaaaacatatggacacactcattgatgaactctttttgttttcgaagctcgatttgaatcgagttccattccagtttgaaacagttgaattaaatacgtttatgcaagaattaatagaagagatgcagatggatttaagtaaagaaggtatagaagttaacttacaattacatgcatcaacactatatgtaacggctgattgtgaaaaaataaatagagtgatatcaaatttagttcataatagtgtgaaatacatggataaagaagagaagaaaattactgtaacagtatcgagtgataataataaagttattgtgaaagtgatggacaacggatcaggtatagaagctgatacattgccgtatatctttgaacgtttttatcgtgcagagcaatcgcggaattctagcacaggtggaagtggacttggtttagcaatagcgaagcaaattgttgaagaacatggcggggaaatttgggcggaaagcgagcttggtaaaggcacaagcattttcttctcattggaaaaagtagaggaatgtggtgagtaaattgaaaagaattttattaatagaagatgaagtaagtattgcagaattacagcgagattatttagaaattaatgatttccaagttgatgtagagcattcaggagaaataggtttacaaacagctctgcaagaagactatgatttaattattttagatattatgcttccgaaaatgaacggattcgaaatttgtaaacaaatacgtgctgtaaaagatattccgattctacttgtttcagcaaaaaaagaagatatagataaaattcgcggactcggattaggagcggatgattatataacgaaaccgtttagcccgagtgaattagtcgcaagagtaaaagcacatattgcccgttatgaaagattattaggaaatgtaagtaagcaacgtgatacgttatatattcacggaatttctatcgatcaacgagcgagaaaagtttttataaacaatgaagaagttgcgtttacaacgaaggaatttgatttattaacattctttgttacacatccaaaccaagtattaaataaagaacagttatttgaacgcatttggggattagattccgctggtgatttagccactgttgtcgtccacattagaaagctacgtgaaaaaattgaaagagatcctgctcacccgcaatatattgaaacagtatggggagctggttatcgttttaacgtgtaatatacctgccgagtaattggcaggttttttatgttatttgtcaaaaggaaataataggtaatttgtgttaagatataaagagagataaaacatagtagagcatgagagggtgtgctacattttgggagatacattacaagataataaatcaaacaaggtcttaaggattggaactaatattataattattttattaattattggtgcaatacaaatgttttatgataaagattatacaaatgatcatttcggctggttatttttagtattaggttggatagttagaagcatttttaatattacgataggtttaaaagaaggagataaaaagtcagtgttgtttgatgtaggtttggtgctcttttccttttatcttttatttttatatagtacgaaatatttcttctgaaaatttagctcatagtcttatagagactgtgagctttccttaataataacggtactggcgtaacgatttataaaatatttgagtagtagaagtaaacagggtcgcttcttctaaaaaaggataatggttgctgttttcgaatggaatgaagatagagttacgtatcccatcatgtatctcgatagaatattgaactggacactgcacatcatatcttccgcatataataagtgtctttgtttggatgaaaggtaaatactctcttaaatcaaatgaaggatattcattggcgaaagcgttcatccggctaacggacattgttttattgattggtttacaaaaataagagttgtagttttctggtttatacaatgataattttgttctctcagtagatagttcttttcgttcttcacttgtaaggtgagggctttttaagttttcgatgtgtttttgcatataatgaaactgtggatgtgctgggtgataaatgcaaaatggtgtttcggtatagttacttgctgcagctcctgctacgactaatgattgtaaggaatttggatatgtaatcgcatataaaagtccaagcataccacctgttgaatgaccggcgaaatgccatgttggaagttgtaatgcttctcgtattgcttctaagtcgtggattgtttcaatcatgcttaattcgttttctgactgggcggttacagagcgaccagtatctcgtaaattaatgagaaatacacgatgcgtagcagtaaaaacatccgcaaagtaatcaccagtttcattaaattgtgaatagtgatgtgtaatacaaagcgattcgccatttccttttgtaaagagttcaaatgtaccgcgtttcgtgttgattatttgttgtgtccacataatatcacgaccttttctcataaaagttgggccagactgttataaaatgaaaatatatcagcgattattagaatatatcggcgcaactcggaatatatcagcgattatcaaaatatatcggcgtaactcggaatatatcagcgattattaaaatatatcgacttaccgacagaaaacgacaataatagcaagctttaaataaaaggaggctattcaaaaacgagcctccttttcgtttagtataaagattttgtcatattattccgaataatttcaagggatttcgctacagttaatgcgtttttttcttcaatttctggtttacgggggataggtttatacatgttgtctggatcttcccatgtgaggggaagttctgtttctgcttgtcctttccaagcttcaatccattctggagggagataacctgagatgttttggatgttgttcatttcgagccaaatgagtgcccatgctcttggtacgacacgccaatggtcatagccgccaccgccgacagcgatccagcgaccttcgcaatattcattagcaatttcacgagcgagcttcggtatttcgcggtaaatattcattgtcgcacaaagatgtgtaagtgggtcataataatgtgcgtcagcaccattttgcgttaaaataatatccggtttaaagtacgctgcaacttctgttacaacagttcgatatgattctaagaacgattcatcttctgtaaaagcatcgagtggaacattaaaagaataactataaccattaccttggccacgttcgtttacagcgccagttccagggaataaataacgaccagtttcatgcagtgaaatggtgcatacgttagggtcatcataaaacgaccactgtacgccatcaccgtgatgagcatctgtatcaatatataagacgcgtaaaccgtatttcttttgaatatattttattgcgatagaactgtcgttataaatacaaaagccagatgctttgccgcgaaagccgtgatgtaagccgccgcccaaattaagtgcgtgttttacttttccggaaagaacagcatcgacagctgttaacgtaccgccaacgagcaatgcgcttgcttcgtgcatatttgggaacatcggtgtatcttctgttccgagtccatatgtcattgcaattgatttttctaactttccttctccagcacgttttaccgcatttatgtactcctctgtatgaacgtaggcgatctcttcatctgtagccatccgtggtgagatgatttgagagggagagatgaaaccgcccttttgtaataaatcatacgtaagtgtgacgcgcagttggttaaaaggatgatcagggctaaatgaatagccccgaaagtcatccgaataaataaacgcgctactcatgcttgcatccccatgatgtttggccataatacgcggtaaccttctgcttcaagtgcatcaatcacttttagaggattcatcgtttgaatgcggaaaacgagtactttatcattctcgtcttttgctgggtagacgagaacgctcacgatatttatttgtaaatcactaaaaatagcaacgacttttccaagaataccaggttcgttttttacttgaatttcaatttgcgaacttggttgatgtgctcctgttaattttactaatgtgtgcagtactgtagattcagaaatgattccaactaacttcccggcctttgtaacaggaagacagccaattttattttcaaaaaataaagtagcaatttcctcaacgaaatcgagaggatggcaagtcataacaggatgtttcataataagttcgagcggttgctgtagcatatcgattgaaacttgttcatctagaatagacggacttgcatctcttacatcccgatcagaaataatgcctacgacgtgattattttgatcgacaattggaatgtgccgaatgcctttcgtgcgtatcgttcggattgctgtttcgattgtatcgtttggatgcaatgtaactacattttgattcataatttcttctacaatcattccagttgccccctttattaatacataaaacgattgtgaaaacgtagacgatcaaaagcttgaatagaatccgtatcaacgcgtttaccgatgcggaccattaaacagttggcaggatgtgaacaaatttcaggatcgtctgtagccatccattgtaacccgccagcattcatcatcttctccattacttttcggtattcccacacattcaatcctgtttgtttcaaatcccagtgccaataatattcagtcgtcaatataatgtaatcttccatataatcgtccatcatagaaacctctagtaagttctttccgacagaactcccgcggaaggctgggactacttcaattgccccaagctcaattaagttttccatttttccttctgaccatcgttcaagtggatcaggatacaagtatgtaacatatccaacaattgtttggtcatgtctagcaataatgagacgagcttctggtaatttagaaatttcgacaattgctttatattgttgctcggcaggacgaaacgcaattaagtctggatgaaactcatacatttctaagttatgtgtagagacaggaccttcaataattaaagtgcctttcgccgtttttaagtttctagcattatatatttttttatgaatcaatgtattgctcaccaccttgagggtttgtgaatctattaatatcgtactttataatatatgcgatgtgaatcgaaatttgtcattaaaaatttgtctaaaaatcaacaaatatactgaaaattttaaataatgtcattataatagataatagaatacataggagggggatgtaaagtatgaaagtagaaacgcttcctgtcattaaaggagaaaataatttgccgaattatgatgaggcatacgcgaattttaactgggaagaggttaataaaaactttacttggaatgaaacaggccgagtaaatatggcgtatgaggcaattgataagcatgcgaaatccgatcgaaagaataaagtagctctttattatcaagatggatcgcgaaaagagaaatatacatttaaggaaatgaaggatttttctaataaagcaggaaacgtccttaagaattatggcgatgtagaaaaaggcgatcgcgtttttatttttatgccacgttctccagagttatatttcgcacttttaggtgcagtgaaattaggagcaattgttggaccgctatttgaagcatttatggaaggcgcagttcgcgatcgcttagaagatagcgaagcaaaggtgttaattacaacgcctgaattgttagagcgcgtaccattaaatgatttaccggctttaaaaacagttttccttgttggagataatgtagaagaaggcggtaaaacggtagcgttcaatcctttatttgaacaagcttcaaaagaattacatattgaatggttaggccgtgaagacggcttgattctacattacacgtctggttctactggtaagccaaaaggtgtgcttcatgcgcaaaacgcaatggttcagcactatcaaacggcgaagtgggtattagatttaaaagaagacgatgtatattggtgtactgctgacccgggctgggtaactggaacagcttacggtattttcgcaccgtggttagttggagcgtcaaacgttattttaggtggacgctttagtccagaagcttggtatgaagcactgcaagattacggtgtgacggtttggtacagcgcaccaacagcattccgtatgttaatgggagctggacaagacgcaattaaaaaatatgacttatcacaagtgcgccacgtattaagcgttggtgagccgttaaatccagaagtaattcgctggggtatgaacgcatttggacttcgtattcatgatacgtggtggatgacagaaacaggtggacaagttatttgtaactacccttgtatggaaatccgtccaggctcaatgggtaaaccaattccaggtgtgaaagcagcgattgttgataatgaaggaaatgaagtgcctccttacacaatgggtaacttagcaattgcgaaaggttggccatctatgatgcgtgggatctggaataacgagcaaaaatatgaatcttatttcatgccgggagattggtacgtatcaggtgactctgcctatatggatgaagatggatacttctggttccaagggcgtattgacgatgtaattatgacgtcaggtgagcgcgttggtccgtttgaagtagaaagtaaattaattgagcacgctgctgttgcagaagctggtgtaattggtattcctgatccggtgcgcggcgaaattattaaagcatttatcgcacttcgagcaggatacgaaccatctgatgaattaaaagaagaaattcgtcaatttgtaaagaaaggcctagcagctcatgcagcgccacgacaaattgaatttagagataaattaccgaaaacgagaagtggtaaaattatgcgccgcgtattaaaagcgtgggagttaaacttaccaacaggtgacttatcaacgatggaagattaagagagaaaggtctgaacgaaaaatgttcaggcctttcttttttatgatatcatgaacttatatatataagttaaaggggatagtatgatgaaaacagaaaaagaaaagatgatactaggtgaaatgtacataccagctgatccagttttagttcaagagagggagcaagctcgtatattaacgagaaaattaaatgaaacgccagaagtacaattaaaagagcgtagcgaaatcgtaaaagaactattcggaacgactggagataacattcatcttgaatcttctttcagatgtgattacggctataacattcatgtgggtgaaaatttttacgcgaactttgactgtaccattttagatgtatgtccagtaacaatcggagtgaactgtatgttagctccaggtgttcacatttatacagcaacgcacccgcttgatccggtagagcgcataagcggatcagaatacggaaaaccagttacaattggcgataacgtatggattggcggaagagcaattattaatccaggtgtaacaattggagacaatgcggtgatcgcatctggtgctgtcgtaacgaaagatgtgcctaataatgtagtagttggcgggaatcctgcaaagattataaaaaaactaaaataatatttgaacgaagtgccttcctcgtctgtatacatttatgaaagaatagatgagggaggcttttatatgtctaataaattacttcttacttttgctgtaattggaattatagttgtattttcttgtggtcttttcttaccgataccaattggatatagagtatcaatgcttacagctggagttataatgggtgttatgttttcaatcattattccatttgatagaaaacatatagtacggaaaaatggatataaaattgattttacaaaaacaaaagtgtattttcgctggaatgtatttgacactatttctatctgccttgcgttgtatgcatgcatatgtgtgcaagcgttaaatactttagttactatgggatttacgattcaaaacccatatgtgcaattttttacaaatcaatcacaattgtggatttttattgcgattgcatatttaatttcccgtatttcattaacgttaaaaggaataaaggagatcaaaaatcatggcgcagattgggattgaggaggagctcatgcttgcgtatcaaagtggagataaacaagcgggagaaagactatatgttttaatcaaaccagcgctatacacatttttatatcgatttaaccgagatgaacaattaagtatcgatcttgtgcaagatacgtttttgacgctagagcgtaagaaacatatgtatgaacttgaaaaaggtaaaataaaaacgtatttatttcaaattggttatcgtcttatgattaataaattaaataggagaaaaaagtggcgtacgcttttgccatttttagtgccgattccggaaaaagaattttctcacgaagatcggctcacagtaagagaagcaattttgaaagttccagaagagcaaagagcggtcctaatcctttcttattatcatgacatgcagcaaaaagaaattgcagagatattaaacattccgattggaacggtgaaatcgagacttcataacgggataaagaaattgaaacaattgctggaggtggacgaaattgagcgaaaatccctttaagagtgaatataagttaaagcaacatttagatagtgatcatgtagaaataccagactttccaaaaacggtaagtcgattcgatcgattaatcgggtttcttggttccccagcgaaagatcctgtggaggcgaccattgggaatgatttatcgattgtgtttcatgtatcgttattagttggggttccaattctttctcttattacgatactctttatggtgttgtaaaggattgacaagaagggaaacctgacctctatttgacatgcctatataaatgatggtataaagaaaagtatatgaataattgagcgtggaaagggagaagtagtgatcatttccctgttttagagagctgatggccggtgaaaatcagcacatagatgatcgcgaattacgcccctagagcatcttttttcgattgaattttattcaaaagggaaaagacggtgctaagccgttatgtaaataaggtggtaggcttttttgcctgcaactagggtggtaacgcgataatcaaaatcgtcccttatttgaaggggcgatttttttatgttttcaaccttcacgccagtaatgaacttaaaggagagtatgtaggatatgggtattttacaagatcttgaatttcgcggtctaattaatcagcaaacagatgctgagggccttgagcaattattagaaaaagaaagcgttaaattatactgtggtttcgacccgacagcggatagcttacacattggtcatatgttaccagtattaatgttacgtcgtttccaattagctggtcaccaaccaatcgcacttgttggcggtggtactggtatgatcggtgacccgagtggtaaaaaagcagaacgtacattaaatacgaaagatacagttgcttactacacagaaagcattaaaaaccaactttcaaacttcttagagtttgaaaacgtggacaacccagcaacgatggctaacaactacgactggcttggtagcttagatgtaatttcattcttacgcgatatcggtaaaaacttcggtttaaactatatgttagcaaaagatacagtagcatctcgtttagaaactggtatttcattcactgagtttagttacatgattttacaatcatacgacttcttaaacttatatcagcaacataattgccgtctacaaatcggtggtagtgaccaatggggtaacattacagctggtcttgaattaatccgtaaatcagaagaagatgcgaaagcattcggtttaacaattccactagttactaaatctgacggtacgaagtttggtaaaaccgaaggcggcgcaatttggttagacccagagaaaacaactccttacgagttctaccaattctggattaacacagatgaccgcgacgttgttaaatacttaaaatacttcacattcttatctcatgaagaaattcttgagcttgaaaagcaagtagctgaagcgccagaaaaacgtgcagcacaaaaagcattaggttctgaaatgacaaaacttgttcatggtgaagaagcattagagcaagcgattaaaatttcagctgcattattcagcggttctgtagcagaactgactgcaagcgaaatcgagcaaggattcaaagacgtaccatctgtagaacgtactgcagaagatacagtattaatcgacttacttgtagaaagcaaaatctctccatcaaaacgtcaagcacgtgaagatgtaacgaatggcgcaatctacgtaaacggtgagcgtacacaagcattagactacgttgtaacagaaaacgaccgcatcgaaggtaaattcacaatcattcgccgcggtaagaagaaatatttcttaattcgttactaattagaaacgaatgtaaacaaatagtaccccgaattgtaggctgaaaagtctatgattcggggtttttatgtatggatttaaatcgccggatcttttcttttaaatagaatataaagaattaatatgagcatataaagtaaactaactagcataacgataaatgctgttggataaaattttgccgcatatataaagaaatcgatttgataaatatcttggtaatttgaaacggtgcctttaaagtaatttgtaaacttagcgctatatttccattcatcaggattatctattaaattactcccctgataccaactcatcagtgcggaagtaataaatagcataaatgaacttccgagttgaaccatttgatttattgtcaaaaagaatccacctcccattttatggttattataacgtgcattcatatgcttgtaaccattttgttgtaatctccttttcgagttcatacggaaatcacatgtaagcggtatgataaatgtataacaactagaaaggagtggtaaaacgaaatgtcactagaagcgctcattattttttctttgctaaatgcgggtcagcttgcagagaattcgaaggtggatgtacataaagagcagaaagatgcttatgtatatgttcagaaagaggaaaataaataactttaatatatataaataaaggctgccagagaaaggttttagtttctttggcagcttttctattgaaatgttttattcatcctcattttggaagcattaggtgactaaaacaactaatgtaagtttattaattataactacatctttatctttatctttttcgtcatcataatcaactgattttgtttttccacctacaaagttagctaaaatacttgttattgattctgagtctagtaatttgccgatctcaatattttgcttctttggcacatacccctttaaactccattttgtacattttgtatttcattcaatgttgaagacattatatctacataatctatcatagcacctatgtttaacttggctgtttcagtatcattttcatttaaagctataaatgcttggtctaccatttgtttaattgctcttgcatcgtctcttaattgaactttgaagtaatcatactccttaggaggttctatacttgctagtctattagctctcccacttactctacttaattctccctttaatcctgtttgagttgttttccacgttccatctttttcagctaaggatttaatagattgaactgccgtctttaagtcattagaagtatccttaatatcttcttgatacttctctaaaggagaagatgcactagaacctttagttaactgcttatctctatactctctttcctcagctagtgttctaccttctccaattacagcttcttttactgttttatcgtttgagacttcatttttatctgtatcctctttctttttcgttacctctttttcttccttagctttcttttcagcaagcaatttttccttttcagcaagcaattcttcctttttagcaagcaattcttctttttccttgtttagcttatctgcttctttgtctattgactcgtctttcttcttttctgactctgaaatctttaagctatcagtcttattctcttctgtattgttcttagaacatcctacccacgctactaacataagtggtaatgctaaaaaacatattagtttctttgctttcattgcgtatactccttttaaaaagaattgtaattaattaacatatgaaactataacataagttacataaataagatatatagatatttcatccttaagagggttttaacaatatgaaaacatgtattacggttgtggagaatcccactccgtatacttttaaaaaattcctttataaattccttagcgtttgggggcttttttatgctttcataaactctttatcaaagaagttgtttacgtaactgattatttttgtaagggtattaataaaactcaaagcgaacttatccatattcataatgaaagggtgatgaaatgattattagagaaggtattgaagtaactagaataactttagatggtatgaattaccgattccagaaggggattctgagtttctgcttcgtgctggatattgggaagttggtgaaaaagtagaaagaataaatcgtgaggaaattctggcggattatgacagaaaggtttttctggaagatggaaaattgtgtacgatactcacttacaaagggaataaaaagaaaagatgtgatagaggatgagtgaagaacaaattattcgtgatgaatatgagtatgtggtgaaagtaatccttacaaaggaacagcggaagaaatttttaacaccgttaataccagctgtacgggagctaattataaaaaggaaagtagaacaacgaaataagcaaaatgaaagtatgaaagaaggtgaataacaacattcttgatattaaaatagatgaacaaaagattgaagaacttttcttagaagagttacgaaaacggctagatcatattgaacatagaaaaatgttttgggatatgaaagaattgtgtagacaaacatgtatgagtggaaattccatcagagaaaattgcttttatgatgaacgtttcccgaaatttaaaatagatggaaagtggtatttttcagcgttagaagtggaaaagtttcttcttatgtagataaaagaacaatgaacaattttaaagaaagaagggctaataattattaattactaataagatgaatgtactacggacctacagaggttttattattttacttacacttatccatttctatacacacgccagccatattattttttgcccccagtacattcttttttatgctttatataaataaaaaaagcccaggaaccttgaattaacaaggttcctaaggcttttaatacgactcttttcagagtaccgagattaacgagagtagaactctacgattaatgcttcgttgatttcagctggtaactcagaacgctcagcgtgacgagtgtaagtagcttctaatttgtcagcatcgaaagttaagtattctggtacgaagttgttaacttcgatcgcttctttaacaacaacaaggctgttagatttttcgcgaacgctgatagtttgaccaggttttacacggtaagatgggatatctacgcgagcgccatcaaccatgatgtgaccgtggtttactaattggcgagctgcacgacgagtgcgagctaagcccatacggtaaactaagttgtcaagacgagcttcaagaaggatcatgaagttttcgccgtgcttaccaggcattttacctgcttggtcaaatgtgcgacggaattgacgctcagtcatgccgtacatgtgacgaagtttttgtttctcttgtaattgtaaaccgtattctgaaagtttcttacgttggttaggaccgtgaggacctggtgcgtaagggcgtttttctaattcttttcctgtgccgcttagagagattccaagacgacgagacagtttccaagctggacctgtataacgagccatagttgactcctcctttaaaaatgtttttatttacgtaaaataaaaacagacgtaatcgatatttacgggcattttgttttcatgtaccttcgctccagcagcagggagttacgagatacacctccgtagaggaacaaaatacaaacgataaactcacattacaaggctgcctttttattttacacaaacgctattatatcttttacccagagtttcgtcaagcgagtacgtttttgttttatgcatataaattttggaaattaatataagaaggaatttaaaacaatatagaagaagagatagaaacacaaataaagcgcttacataaaatgaaggaaaatgttcatcaaatttttatggatgaatatgcggcaataaaaacataagggggatgtttttatgaaaaagaagcatatggagacagcgttaattcatcacggttatacatctgaggaacataaaggaagtttaacaccacctttatttcaaacttctacatttacatttgagactgcgcagcaaggagaggcgagttttgcgggagtggatccatcttatatttactcacggcttggaaatccaactgtgaaattatttgaagaacgtatggcggtgttagaaggaggagaagaggcacttgccttcggatctggtatggcagctatttcagcgactttaatcggttttttaaaggctggagatcatattatttgttcaaatggattatacggatgcacgtacggttttttagaagtgttagaagaaaaatttatgattacgcattcgttttgtgatatggagacagaggttgatattgaaaataaaattcgcccaaatacaaagcttattttcgttgaaacaccaattaatccgacaatgaaattaattgatttaaaacaagtgattcgggttgcgaagcgaaaaggcttacttgttattgttgataatacgttttgttcaccttatttacaaaggccgcttgagcttggctgtgacgctgttgtgcatagtgcgacaaaatatattggtggtcacggtgacgttgtagcaggtgtaacaatttgtaaaacgaaagcattagctgaaaagattcgcccgatgcgaaaggatatcggcggtattatggcgccgtttgatgcgtggttattattacgtgggttaaagacgttagcagtaagaatggatcgtcattgtgataatgcagaaaaaattgtatcgttcttaagaaaacatgatgcggtagaaggtgtttggtatccagaaggggagttagcatctcgtcaaatgaaacgcgggggcggtgttatttctttttcagtaaaaggcggaaaagaagagacgcaagcgtttattaatgatcttcactttattacaattgcggtgagtttaggagatacagaaacgttaattcagcatccagcaacgatgacgcacgctgcgattccagcggaactaagaaaagaaatgggcattttcgataatttaatacgcttatcggtcggtttagaatcgtgggaggatatcgtttctgatttagagcaggcattaaagaaaatatctactgttaatcaatgaaaaaagagtgagctatcggttttgtacaggacgtactaaatcgataactcgctcttttctttttacatatgttttaggagtgtttccacaaacttttctaaatagcgctgatctaattcatcaaaacgatttttttcaggactatcaatgtccagtacaccaatgacagctccttctttcacaatcggtacaacgatttccgaattagaagcactatcgcaagcgatgtgacctgggaattggtgaacgtccgctacaagctgcgttgttttcgtttcagctgctacgccgcaaacgcctcgtccaaatggaatgcgtacgcaagcaggcattccttggaacggtccaaggacaagctgatttccttctgttacgtaaaagccaacccaattaacgcgatctaaaaattggtttaataatgcggacgcatttgataagtttgcgactacgtttgattcgccagttaataacgcatccagttgtttaattactgtctcatattgctgcacgcgagatcctgcataactttctttagtaaacatggaaacagctccttttttatcgagatgtgtaaaatattagcaaaatacgatgtatttcacatgactttgtcgatagaaaattaaaggaatttgtcttaaaagtcaagaaatttaaactatagctgttcattgaagggaagtgagcgcatgaagcagacgaaacaaaaagtaattgatgcggcaatatcgttgtttaatacgaaaggttatgatggaacgtcggtgcgagacattgcaaagcgagcggatgtgaatgtagcgaatatttcatattattttgctgggaagcaaggtttattagaacagcttattactgattttttagaaggatatattcatgtgattgaaatgtcgtttgaacagagagagtatttgtcggctaaagatgtgatggtgcaaatggtgcgagggattttacgatatcaatttgaaaatagagaactaacacgtttcttctaccgagagctttcgcttgatacgacattaattcgtgaagtgatgaccgtttatttttctaaagaaagatattatatagaacaaatgattagacaaggacaaatgaaacaagaatttcagaaagtatcatttacaatgtttatgacgcaattaaaaggtatgataaatatgccgtttttatatccacaatatatatcagaagtactccattctttcccgtctgagacattttttatagagatgtacacgaaagagattgagcaatggatggaacaagcattatgtaaagcgaatatgtaccatgaatggccaagagctgttcatatgtgaagaatccccacctaacgaactgaggtggggatttttatgtttacttttctttgccataaattgttacataatagcgcgataattgttaatgcagctccagcgatttcaattttatcgactgtataacctcgaaagatagaaccaatcagtgcaaggataggaactaaattcataaataatatgccgttaatagatgaaatatagcgatttcccatattccagcaaaatacagcgataacgcctgcgataatcgacatataaaagagttcaaaacgaacgctcacaactgtacgcagtgacggcatagtaactatatttgtgtacgttaagaaagtaacaataacgatgagtgaaatggagccaaataaacaagttaatgtcgtgtacctaagtggtgaccaagattgaaaacgagcacccccgtttgtataaatgacccagcaagtaacgccgcatagcatcaatatatttgttgataagtggcttgcagctccaaatagtaattcaatatttccttttgaaatgacaagcataacaccaagtaatgcaacgaacatacaaaggaatgtatagttttgtgggcggcgatttttcgttatccattgcagtgataaggcaatcagtggcataagggattgaatcatagctgcatggattgctccggaaggtccggcaagttgttgtccgtagaaaacgagaaaaccataccccgcgaaaccgactgtcccgtaaaagaatagagaaagtgttcttttttctaagcggagtgaagtctttccttcagtaattaatagcaaaataagaaaaataatagctgctgatccatagcgaagcgttgtgaagaagaatggatcgataaattgcagagcatttgccattacaggaaacataaatccccaggcagtgacggcgagtaagcatagaaaggatccgagtagcatttgttttttgttcaagagtatctttcccctttacatttcgttatagtaagttgatgaaataagtataaagagtaattgtttataggaggaaatatcgatttcttataacggttataactttttgttagaggtgtgtacgatggatttggaggcagtacgatcgtttattgaagtgaagcatacgcgaagtttatcaaaggcaagtaagattttacatatatctcaaccagcgcttagtaaacaaattcaaaagttagaagcggatttagaggttactttacttaagcgttcggcgcaaggagtagagttaacggaggcaggagagttatttataaaaagaatgttaccgattttggagcaaataaatgaagtgaaaacagaaatgagggggtatcaagagaaccggaagttttcaattggtatactaccgagtttagcggagcattacatatcagaatgtaaagatatattaggtgatgagttcgaagtggaatggcaaatcggtcatacggaagtattaagagatttatttaaagcgcgggagattgacgcgatgttcatcgattcagtagtagaaggtgttacgtatataaaagaagtgcaacaagagaaaattgtttgtgccgtttcaaataatcatccgtacaaagagaaggtagtcattcaaatagaagagctgcacaatgaaaaattaattgtatatccagaaatatgtgatgtaaggaaaatgattatgaacatgtttcatgaaataggtgtaaaaccaactatagctgtggaaacatcttacgcagaaccgatgcttgcaatggtaaaagctggccttggtatcacgttacttccagaaagggcagtagagcagtctgtaaggcaaggaaatgtacatgtaatctctgttgaaccaccactcatgcggaaaatttatttcgtatcccatacgaaagattgtttgttattacaatcatttgaggataggtagtgaggtaggcggaatattgagaaagattacaatcacattgaaaggaacatgaaatttttaaaaaaactaggtcaaaaacaaaccattacatggtatgattagtacattgttagttgttaaatataggggaattccctttttatacataatgccttccatttcataaacggaacggacaaaaaaagagatataactaggaggcttttttgcatggattctatcctgacgatcgttatcattgtagtaagctctattctagtgctgctcatgatagagcttgtgataagaaatcgttcatataaagatattgaagcactggagcagtggaaacaagagataaaagataaacctgtggcagatgaattaaaacgggtaaaagatttaaacatgacgggtcaaacagaagaactgtttggtaaatggcgtgaagaatgggatgaaattgtatcaacaacccttccgaaagctgacaaagatttagcgcaagcgcgaaaattcgcctcgcaattctccttccgaaaagcaaagcatgcgatgaacgaatccataagtggtttagatgacgctgataatcgtattacggacattttaaatgaattacagcaattgttagaaagccatgagaaaaatagctcggaaattgaagggttacgtgatacatatcgtagtatgaaaaagagtgttcttgctcatagacatatgtatggagcagcagagcagaaaatcgaagagatgctagacgctgaatctgagaaatttaaaacctttgaagaagcaacaaacaatggcgactatttaaaagcgagagaaattgttattagtttggaagaaggtttagcagatttagaaatcattattcaccaaattccagatttattggtagagtgccaagcgacgttaccagttcagctggaagatttattacacggacataatgatatggtaagacaaggttatgtattagattatttggaagtccctaaagaagttcgcgatatgacgaaacaactacaaacatgtttaatggatatacaggagcttcatataacagaagcggctgaaaaagtagaaaacttaaaaacacgtttagatggcttctacgatcaattggaacaagaagtacatgcgagacattatgtggagcaaaaaacactttctgtttacgatgacttagaagaaatgcgtatcgaaacgattgaaacgaaaacagaaacacaacttgtgaaacaaagctatcagttacaagataaagacattgagtctcaaaaagtaattgaaaagcaaatgcacattttaacgaaacgttttgaaatgctgcaattacgcgttgcagaacaagatattgccttctctattattcgtgaggaactagaagaggtttatgagcaatgtgaaacgttaaaagtacttcatgcagaatataaagaaatgctgcaagcgatgcgcaaagaagaatttgaagcacgtgagaagttacaagaaatgcgaaatattattttcgaaacgaaacgctttatgcaaaagtcgaatttgccaggtcttccagagagtattatggaagatttaaaaagagggcaaatggcaatgcaagctgtatatgaacaattagaagtgaagccgttaaatatgaacgctgtaaatagcagtttagaagaagcatacacaactgtgaacggtgtagctgaaatgacagaagagttaattggacaagcatatttagtggaaaaattaattcagtacggtaaccgttaccgtagtcatgatgaaaacctagcagaaagtttaaattatgctgagaaattattccgtgaataccaatacgatgcagctttagaacaagcggcttcagtgttagagcaacttgaacctggcgttgttcaaaaaatagctgaatatgtagacaatgaacaaaccctttcataaaagggtttgtttttttatgtaattttgcaggcgatgttgctataatgaatagcggaatacagtaaggttattcgtttcaaaataaagtgaaactgtaatcggtgggaagattcatccccactgattactagccttcaccaatcgggcatttacgggcagttaatctcccatctaacttctttgctctaactggattttgaggtgagagtcttattgcccgttaacgcgggataaagtgaaactgtaataggagggcatcctcgccaattattagccttcaccaatcgagataaaacggaacctttgcgtagtcttagcgtaatgacacgtatttatgatatgattatacgatgtgatagcgctgaaaggggaagaacgatgatctattttgataatagtgcgacgactaagccatatccagaagctcttcaatcgtacgtgacggttgctgggaaatattttggtaatccttcttctattcattcgcttggaggagaggcagagcgtctattaacacaatcaagaacgattgcagcgcagcttcttcgtgttaaaccttctgaaattatttttacatcaggtggaacggaagggaataaccttgcgattaaagggatagcgatgaggaatcgttcgcgtggtaaacatatcattacaacaaatattgaacacgcgtctgtgtttgaagcatataagcaattagaagaactcgggtttgatgtaacatacttaccggttaacgagcatggtgttgtatcggtagaagatgtgaaacgagcgcttcgtgaagatacgattcttgtgtcaattattcatgtgaacaacgaaactggagcaattcagcctgttgctgaaattggaacgttattatcgaatcatccgaaaataagattccatgtagatcatgtacaagggataggaaaagtaccgcttgatttatatgcttctcatattgatctttgctcaatatctggacataaattccacagtgtaaaaggaacaggtcttctttatgtacgcgatggcgtaagattagatccgattttatcaggtggtcaacaagagcttaagtatcgctctggtacagaaaatttacctggcattgtagcgatggtgaaagcacttcgcatgacaatggaacaagtgaaagaaaaggtagctcatttgcaaagtttacaagcagagcttgttcgtttctttaaagagatggaagatgtaacgattaacacgtcgcttgcatatgcagcaccgcacattttaaatgtatcatttgttggtttaaaaccagaagtagtcgttcatgctttagaagaacacggtgtatatgtgtcaacgaaatctgcttgttcttcaaaagcaaatgaagtgagcagagtgttagtgtcaatgggagtgccgcatgcagcagctgcaagcgctattcgtattagtttagcaccagaaaacacaatggaagaagtaaaacaatttgaaggtattgtaaaagagacgatgccaaaattatatgaagtgatgaggtaaagaaattatgttgaaatatgaatatattttagtgcgttacggagaaatgacgacaaaaggtaagaaccgttctaagtttgtaagcacattaaaagataacgtgaagttcaaactgaaaaaattcccaaatattaaaatcgatgcaacacatgatcgtatgtacatccagttaaatggtgaagatcatgaagcagtctctgaaagattgaaagatgtattcggtattcataaatttaacttagcgatgaaagtaccatcagaattagaagacattaaagaaggtgcattagcagctttcttacaagtaaaaggtgatgtgaaaacatttaaaattactgtacaccgttcttataagcatttcccaatgagaacgatggaattattacctgagattggcggacacattctagaaaacacagaagatattacagtagatgttcataatccagatgtaaatgtacgcgtagaaattcgcagtggttatagctacattatgtgtgatgagcgtatgggagctggcggtttaccagttggcgttggcggaaaagtaatggtacttctttctggtggtattgatagcccagtagcagcttacttaacgatgaaacgcggcgtatctgtggaagcagttcacttccatagtccacctttcacaagtgagcgtgcaaaacaaaaagtaatcgatttagcgcaagagttaacgaagtattgtaaacgagtaacgcttcaccttgttccgtttacagaagtgcaaaaaacgattaataaagaaattccatctagctattcaatgacggttatgcgccgtatgatgatgcgtattacagaacgtattgctgaggagcgtaacgcacttgcaattacgactggtgaaagtcttggacaagtagcaagccaaacgttagatagtatgcatacgattaacgaagtaacaaactacccagttattcgtccgcttattacgatggataaattagagattattaaaatctctgaagaaatcggcacgtatgatatttcaattcgtccatatgaagattgctgtactgtatttacaccagcaagcccagcgacgaagccgaaacgtgaaaaagcaaatcgttttgaagcgaaatacgatttcacaccattaatcgatgaagctgtagcgaacaaagaaacaatggtattacaaacggtagaagtagtggcggaagaagaaaaatttgaagaacttttctaaaaccataaattaccatatttaaaacgtgtatgaagtcatgttatttatcacactctatactcacaaggaggtgatataacatgtcacgtagcacaaataaattagcggttcctggtgctgaatcagcattagaccaaatgaaatacgaaatcgctcaagagtttggtgttcaacttggagctgatgcaacagctcgcgctaacggttctgttggtggtgaaatcactaaacgtctagtttcactagctgagcaacaattaggcggttaccaaaaataatcccatatgatggcttagaaagagcgggttctcccgctctttcttttttgtgttgccatttgtcggtaagttgatgtaatttcatttagtaattcgacagaactgaaaaatttgtcaaaagaagagggttcaaaattaacagaaaattctttattatataaaggaggcataaagaaaagggaggatattttatgaagagagaagaattgttggcgccaccgtcttataatttagtttctgaaatagagaaatatacgggtgataaagggaaattagctttaatttggcaagatgataaagggaatcgaagggaagttacatacgctgaattaatgcaaggtgcgaataaaattggaaacgcttttataaaaagtggtttgcaaaaaggggacaagcttctcattatgatgccgcgtttaattgaagcgtacatgacgtatattgctgctattaaagcaggatttgtcgtaattccaagctcggaaatgttacgtaaaaaagatatagaatatcgaattggacatggagaagtaaaagcgatagtaagctatgagccgtatattaggcagtttgatgatatagaagcgatggaatctcttcggaaatttgtcctgagcgagcagtcagtagatggatggattaatttaaaaacagcgttagaaacagagagtgacatgttagaaatggcgaagacagataaagaagatatggtctttttatcttacacgtcaggaacgacaggaaatccaaaaggtgtcgttcatacacatgcttgggcatacgctcatttacgtacgagcgctccaaattggctcggaattgaagagaatgatattgtatgggcaacagctagtccaggctggcaaaagtggatttggagcccgtttttagcaacgctaggatcaggggcaacagggtttgtatatcacggtaagtttgaaccggaaacgtacctaaacttattagacgataataaggtgaatgtactttgttgtacaccgactgagtatagattaatggcaaaggtagaagatttaagtcagtacaatttagaggcattacatagcgctgtatcagcaggtgagccgttaaatagagaagtcattggaacgttccaaaagcactttcatattacagtgagagacggctatgggcaaacggaaaatacattacttgttggtgtaatgaaagggatggatattagaccaggttcaatggggaaaccaacgccaggtaaccacgtcgatatcgtaaatgaggaaggtactccagttaaagtaggcgaagttggtgatattgcagttcacattgaaacgccggccctctttaaacaatattacaaagacgatgaacgtacagcgatgcaattccgcggtgattattatattacaggtgataaagcgaagaaagatgaagacggctacttctggtttgaagggcgcggtgatgatatcattattagctctggttatacaatcgggccgtttgaagtagaggatgcacttgtaaaacatccttacgtaagagaatgtgcagttgtcgcaagtcctgatgaaattcgtggaagtgtcgtgaaggcatttatcgtattaagagagaatatagaaaagaacgaagaaacattaattccaacactccaacaacacgtcaaagaactcactgcaccatataaataccctcgcaaaattgaatttgtagatgaactaccaaaaacgatttctggaaaaattcgccgtattgaacttagaaaacaagagatggagattccgtcaaaataattttgaaaacagtgaagtaaatagttgaatgaaatgcaaaacaatgataatataaaaacgaacacaagttcgattttataaacttaaaaaagaggtgtccgtatgattttaggtattaatccgtacttagttttagatggtagtgggcaagaagctgtacagttttataaagaggctttagatgcaaaagtagaagtcatgcaaacttttggtgacatgcctgaaaatccagaatacccgattccagctgaagcgaaagagcgcgttttacacgctactttaaaagttggtaatacggatcttatgatttctgatacattcccaggtcaaggacatgcaaacggatctcaagtaacaatcgcaattcaaattagtaatgcagaaaaagcaaaagaagtattcgataagttacaagaaggtggagaagttatcatgccacttcaagaaacattctggagcccagcatacggacaagtaaaagataaatttaatattgaatggcaagttacaacgtctactactgaacaaaagtaatttttagaaaagcaccatgttttgaaatggtgctttttttatacaataaaaaataaaggagatgggatatatgggagaaatttggtatggcggcaccatttacacaatgagagaagaaaatgaaaaagtggacgctgtttacgttgaaaacggcataattgttgatgctggtaataagggagaattagaaagcagatattcaaacgtaaagttacatgacctaaaaggaaaaacaatgatcccaggtctcgttgatagccatatgcatcttattgggcatggagagagattactccgtctagatttatcaaattgtacatcttatagcgaagtactgactcttgttcagaagcgagtggaagaagctccaaagggctcttggattattggagaaggatggaatgaaaataactttacagatacgaaagatgttcacgcgcgtgatttagatgaaatttcgaaagaccatcctattttattaaagagagtttgtcgtcacgttacatgggtgaattcatacatactgcaagaagcgaatataacagaagcgacagaagatccaaaaggcgggaaaattggcagagattcatcaaataagttaacaggacttttatatgaacaagggcaagaattaattaaacatgttcagccagaaattgatgaagcttatttacaaagagctctgcaaacagcgattaaagattgctggaaatacggacttgttggcgggcatacggaagatttaaattattatggtggttttagaaaaacgcataatgcgttttctcatgtgataaaagaaatgccatttaaagcccatttgctcgttcaccatgaagtagcacatgaacgaaaagaatatgaaaatgaacattatattgaatttggggcaatgaaaattttttctgacggttcttttggcggaagaacagcattattaagtgaaccgtatgaagatgcgaaggaaacgaatggggttgcgattttctcatgtgaagaacttgcagaattagtgaagaaagcacgagatttacatatgccagttgcgattcatactatcggtgatttatcgcttgaatatgtcattgatgcactcgaattatatccaccagcaaaagggttacgtgaccgcattattcattgtcagcttgctcgtgaggagttaattgaaagaatgaaaaacttgcaagtcattatagatatacagccagtctttctttcatcagattttccgtcagtcattgaaaaactaggagagcgccgtcttcgttatgcgtatgcttggaagacattactggaagcagggctacattgtaatggtggctcagatgcccccattgaacaagtaaatccgtttctaggtatatatagcgctgttacacgtagaagttttattgacggtgtatgctatatgcctgaggaaagattaacggtatatgaggctgtttctttatttacaacaggaagttcctatgcaatcggaaaagaagcgaagcgagggcaaattacaaaaggatatgaagcagactttacaatattagaccgcaatatttttgaaattgaggcagaagaaataaaagaagtagaagcagaaatgaccgtaatagatggccaagttgtctatagaaaaaatgcgtaaaaatatatcagcgattttcggaatatatcgactgtaactcgaaatatataagcgattattgaaatatatctatcgtaactcgaaatatatgagcgattattaaaatatatcgacttaccgacaaaaactgacaagaataacgggtggatagtaagagagtattgtccgcgccaatcggggtaaataaataaccgcagaattatggaattccataattctgcggttattttaatcctataaaaacgttctctgtactttttcccagaaagaattgttttttaatttaactgttttaatttgtttatcgcttaagcgtacaacagctttttccacttgtttaatgctaagcgcttcgttatccatgccgataacaggataatcgttaccgtctggtcttagttttaaagttaatgtacgttcgtgatttaaaatgaaaggtgaaccgagcgtacggtaagtgttgttgtttaaagatgctagttcgcttacttggaaacatggaataagtgggtcaacaactgcgccatgcaatgatttattgtaagcagtacttcctgttggggtagaaactactaaaccgtcacctctaaatgtttcgaaatataaatcatcaacgtgaacatctacaacgaatgtttttataatactagaacgtaatgagaactcatttaaacaatggaaagatgtactgtgatctacatctacctgaattgttggatatttacgcacttcaatttcattttttgtaatttcttgaagggctgtatcaacgtgatcaatatggaaatcacagtagaacgaagtttcatctttcgtagaaatccctgcgtataagcaatcttccctaaaaccagttttacgaacggtttgtaagaaggttgcatcatctccaacactgacgatagcgtttgcattttttggatgatctaatatggtaaatccattctcttctaaaatacgatagattggtttcattttttcaacgagcgttgctttgtcatcaccataaaagaaaaataaattgcgacgatctgccattatgtatccctccactgcagttaaattttctgtttttcgtgctacatatcattagagtccgttccctgatgatatgttcaaataatatatttcgatataaaatgtcaaaacacctttttatttttagaaaaatttttatattcaatcttatagaactctgtttaatgatgaataaagttgtcgataatgggtacggagtgaaaggatgatacgtatgaagtggctcgtaattggaataataattcttcttctttttattttgtttatactattgtcaaaaataaagcttaaggtgacatttttatattcagaaatggaaaagaaatgtttgcttcaagtgaaaatatggatgattcgatatacatttgatgtgttggaaagaattgaaaaacagcagaaaaagacaggacagaaaatcgaaaaagctgaagaggacggcggactcgataataaaattatggcgcaacttgacagcattggtgaactgataaaaaagcttcaagaagttcatactattgttaaagattttctcaaacgagtgaaaatcaatggttggaaatggcatacacaaattggagcaggcgacgcagctagtactggaattgtcactggatatgcatgggggacaaaaggtatggctgctggagttgtcggacaatatatgcatattgtcgacgtaccagaatttgaaattaccccagtttttcaaggaaaaggatttgcatcaagatgtgagttaacagcatcttttcgtatattccgcactataaaaacagcggtgaaattgctcatatttatgaggaagcaaagatctggtatgacagaaaaatctgttcaagcataggggggatatagaatggaacatccaattcaaggtttaatgacaacagcaatgcagcatttaaaacaaatgactgatgtaaatacaattgttggtgacccaattaaagcggcagatggaagtgtaattcttactgtttcgaaagtaagtttcgggtttgctgctggtggaagtgaatttggtaaagtagaacattcaggccgccatccatttggcgggggaagtggtggaggagtttctattaatcctgttgcctttcttgttataaatggagatggtgtgaaagtattgcacttagataaacaaacacatgtcatcgataaaataattgaattagcgccacaagctgttgataaagtgaaagaaatgatggataaacgaaaagaagatgatcctgaatttcaaatttaacgaataaagaagctaatcaataggttagcttctttaatttttttgtaaataaagcgattttatttgcattatcgatagggacaaactatcatttacattgtacatattttgtttaaataagggaggattttcaagtggcaaacgtaacttttaaaggtaatccaatgactttagttggaacagaagttaaagttggcgatcaagcgccaaacttccaagtattagcaaacgacttatctccagtaagtttagaaacatacaaaggcgaagtgaaattaattagtgttgtaccttcaatcgacacaggtgtgtgtgatgcacaaacacgtcgttttaaccaagatgcagcaggtattgaaaacgcgaaagtattaacaattagcgctgatttaccattcgctcaaaaacgctggtgtgcagcaaacggtttagaaaatgttgtaacactttctgaccaccgcgacctttcattcggtgaagcttacggcttagtaatgaaagaacttcgtttacttgctcgtgcagtattcgtagtagatagcaatgacaaagtagtttacgtagaatacgtaagcgaaggtacaagccatccaaactatgaagcagcattagaagcagctaaatctgcgaagtaatgtgaagaaaatgacctcttataaagaggtcgttttttctcatatattgctctgtaacggcatcgatatatgagaaaaaacgttatatcatatataactaaaggggagctctttacaggaggtcgctttttctttttggaaaaaatcactttgtggtatgatataagttatgtgtaaaagagagaaggaggaatgtacgtgagtcagacagtagaaacattattttctatttttgattcttctgcggtagttttacgtaaagaattagatgtaacatatttagaggcgcttgtagaaacaggtgataacttgtttgagggagcgattttacaagaggaattatccgaatcagcaattgaaaggctgaatcgtgaatatagtacgtttaatgaagaaacatataaaggtgaagaaattcgtaaagcatttcagttagccatcttaaaaggaatgaaagaaggcgtacaagcgaatcacgaaatgacacctgatgcagttgggatgttcatgagttacttattccataaatttatgcaaggtcaaaatgaaattacagttttagatcctgcaattggaacaggtaacttaatgactacagtgtttaatagcgctaaagaaggactaacaatgagtggatttggtgtagaagtggatgaagtgctaattaaacttgctttagtaaatgcaaatttacaaaagcatgcaatcgaattcttccatcaagatggactagcaccactttatatcgatccagttgatgcagtcgtttcagacttaccggttggttattatccaaacgaaatcggtgcaagtgaatataaattaaaagcagatgaaggaatgtcgtatgcccatcacttatttattgaacaaagtgtgaaacatacgaaagagggcggttacttattcttcttagtaccaaacttcatttttgaaagtgaccaagcaccgaaattacatgcatttattaaagaaacatgctttattcaagggttattacagcttcctgtttccatgtttaaaaacgagaaaaatgcaaaaagtatatttgttctccaaaagaaaggcgctaatgtaacaatgccaaaacaggcgttattagtggagttgcctaaattctctaatatgaaggcgatggaagacattatggatcaattaaatacttggtttgcaacacataaataaagctaggtatatgtaacagcattagtgatttatgtagtacagttttatataatatgtcatatttttaaatatatacaagatttaactgaatttttttgaaatctgtaatatatattttttcttggtgttacaattttttcacttgaaatatatgtcggacgatgtttaaattaaaatcgtgagtataaaatttgctaatgatgaaacgttttcatatttagtgaatttgatcagataaaatcgagcggtttgtggaaacatccacacaactaccaagagaaaaaggggcgaaagactagatgtcaaaaatcatcgcgattaacgcaggaagctcttccttaaaattccaattatttgaaatgccaagtgaaacagtattaacaaaaggtttagtagaacgtatcggtttagaagatagtatcttcactattactgtagatggcgaaaaacaaaaagaaattacaaacattccagatcacgcagtagcagttaatatgcttcttaaaaagttaactgaaaacggaatcgttaaatctctagatgagattggcggtatcggtcaccgtgttgttcacggcggcgaaaaatttgctgactctgttttaattactgatgaagtattagctgatatcgaagaattaagcgatttagcaccacttcataacccagcaaacgttgttggtattaaagcattccaagaagtattaccaaacgtaccagcagtagcagtattcgatacagcattccaccaaacaatgccggaatctgcattcctatacagcttaccatatgagtactatgaaaaattcggcatccgtaaatacggtttccacggaacttctcataaatatgtaactgagcgtgcggctgaattattaggtcgtccaattgaaagcttaagcttactttcttgtcacttaggtaacggtgcaagtatcgcagcagtagaaggcggtaaatctattgatacttctatgggcttcactccacttgctggtgtaacaatgggtacacgttctggtaaccttgaccctgcgttaattccatacatcatggaaaaaacaggccaaacagtagaagaagtagttaacgtattaaacaagaagagtggtatgttaggtcttactggttactctagtgacctacgtgacatcattgcgaaagaagaagaaggcgaccaccgtgcgaaagtagcacttgatgtattcgtaagccgtatccacaaatacatcggttcttacactgctcgtatgaaaggtgtagacgcaatcatcttcacagctggtgtaggtgaaaacagtgcgattattcgtgagcgcgtattagaaggccttgagtacatgggcgtatacttcgatgcaaaacgtaataacgtattcggtgaagaagcattcatcagcttcccacactctccagtaaaaattatcgtaattccaactgacgaagaagttatgattgctcgtgacgtactacgtcttggagatattggttaatatatgaaaaaaaagacgagatcctataggatttcgtcttttttcttttagatgtattttaaaactccatccggatataatattttttctttctgaatgaatgccgtaataggaatccatttcgcatatgctactgtttcctcatcttgtatatttaatattttcatttcatatagtgacgtgtctaataaacgcaaagaatatagttgaataatttcatgaccaatgtctccatctagatgaaagacattttctaaacagcctaaataattggtgatttccacttctgtatgaagctcttccctaaattcacgaataacggtatgtgctgattgttcaccaagttcaattgaaccaccaagaggtcggtaaaatgtttcatcggctgaatgatattcttgtacgagaagacgcccgtgatgtatagcaatgccaaaagcctttgcacgtggatacatatacaatcactccttatttttttgtataaggaagattataatatgttttgtagtaaaggtgtcatgtatttaagaatgtggtctaatcgtaattccatcaaataagtctttccaaaatgcttcattgtattggtatacatccataataggacatttcataacgcaaacacgttgtaatccccaatcttcttgggtgatagttggtatatcggcaggaattagtaacaggacagagaatgtatgtgtaacgatttgagataaaatttgttctagggaacatgcttcttcatatgttcctccagttcgaataaataatatggattcggccgtttcaattgtagctagaaaacgattaatacgatgttcataatttaacttaatttctgtataagaaggccaagaagttggtgtgtttacatctgttttaaagtcatgacaggagtcaatttcataaaggttgtcccttaatcttaattttgcatcatcatcccaaaatgagatgaaggataaattttcgaaatttaaaaagcggtcaaatcgattttgtaataatacattcactttttctaatgaggggcttagcataaaatcaataacgccaaaaaatggtgataattctaattgatataatgcccaagcaggccagcagttttgtcctaagctgaataccgcattatattctttttttatatcggatagattcatgtgatttatctcatcctttttgttaatattttatgccattcaaaaatggtatgtgaataaagatagacaagcatatttgcaaagaataagcagaaatatgttacaatagaaaaaaatcgaacgaggtggttgttacgatgcgatcgaagcgagaacaagccattttagacaatataaaagaatgggaagcgcaattagttgagcaagaagcgaccgattttcaaaaagtgtttgataaatggttacatactacagttgcgaaattacctgagaaaaagcgaaaagaattcttcacgaaagcagatggatggctctttcatttgcatgcatttattcaaagttcacaagcacagttagatgcacgtaatcggattttaggaacatcaagattatttgatgaatcgattgaacagcttgaagatttgaaagcattatctattgatcaattaacatacatagcagagcagcaaacagcacgtcatcgtctatattcatttgtacaaggcggggcaacaggtgctggaggtttattattattaacggcggattttccggttatgatcgcattaaatgtgaaggcagtccaacttattgcaacatcatttggacatgatgtgaacaagccgtatgaaatgatgcttgcgttaaaggtgtttcatgcgtcattactaccaggaagacttcagcaatacgcatggtacaatttattgcaagagctggagcaagaagattcgttcttctacgaaggagacgaagcagtgctacaaacagcttctactgaggttgtgttaaaacaaattttgaagacattttcgatttatgctcttcgtcgtaaattattccaaggtataccggtaattggaatggcaattggatctacagtgaattatcgtttaacaagaaacgttactgaatttgcaaatagattttatcaagtgcgccatatagtcgagaaagaaaaaagagcataaaaaaagcgagaggccgaagcctttcgcttttttaatttgttgcatgttttttagacattggaacagatactggctgcttttctgctgttttttctgtttttggataataaattaaatccaatgtttttgcctgtacggcaatcgaaagaatagtaaaagcaatttctgtccaatttaaataatataatgaaagcgcaagaacaatcgcgtcaaagacgaagaaaatttgcccaattgtaaaacgagttcgtttacttaatacaattgttaaaatatcgtctccaccggttgcaccgccaaatcgcaatataaaaccgagtccaataccagctaacgcaccgccaactactgcagctataaataagttatttgataaatctaccgtaaatggagaataattttccataaaggaataaaatactccgaatgaaattgaacctaggaatgaatagccaaccatttttctacctaaaaatgaagcacacagtaaaataattgggatatccattaatacagttgaaatagatggtgaaatatcataaaagttttgaatgaatagtgcaattcctacaaagccaccttctgttaagtggttttggaagtgaatgtgatatagcgctgctgctaaaataaatgaaccgattaaaaccataaaaatttctttaataatttgccgactttggatgttcctcatcgttattccttctttccgtagttagtagtcctttttgtgttgtaaactaactacgagctcacatgtagctttcagttagtttacgaaaaaactaactacgctatatgtcgctgaagaaataacgaataatcctctcgtccatcaattctccctaccttcgttttagtttaagtcttaaaacgactaaacaaaacgtggagtaggattcttcatttagcaatcctgctcttctttgttttgtttagttagtaacaattaagtcctaaacaaaacgctatgtgtaagaagagtcttttttttgccaaattatccttcgggcaatcataatttccccactctcgtatttttttcgctagactaaagtatctgagctgaaaaatacgctacgtgtatgattcgtcaatacgatgccacatgctccttcgagcgatcatgatatcaaaatcccttccttcaagatttatactattatatcatacttttaaaaaatgtatgcggatggaaaccgacaataaacggagggaatctacaaaaaatgttatgtttaaatatttttgtagaaaagcctaagttatttcggaggattggacagtttgtaacggtttgtccaataagtaagaaaaaaaggttttattccgttgtattcttttcatcacttttatctttgaaaaacgcatcccaactaatcacacttaaaaaagttaaagcgataataacgaaagcacgcataagctgtagacctccttttgtacatagtatatgaatcattcgattcggaatgtgtcatttttttacaagtcttaactattatgagagtatattaatatagatagatgaaggggagagtgaaggtatgctaaaagaaatgttcaaaagaaaagaattaatatgtatttcatgtcagaaaaaaattcaatatgaagaagagcttgttgcttttgtaaagttgccgaaagaaagaagtatattagttggcccttttgatgtgtgtttggcaaaaacagcacaagagatatattgtaaatcatgttacgacaaaaaaagcatgacccaaagtaattgagggacatgcttttttcattggtgtgctttccccatgcccatcaacttaaggatagaaactctacggttttccattaattgaaatggaaaatgtacatatttattcaagcgttaatgtacatatttaagttagcatttatagtaggccattattttgctttttcgttatatcatatagtataatattcaaaatcagcaaggattttttcctgaatttttgctgatgaagatggaaaaatttttcggctttataggttgataaagttatgtcgtaacaggaaatataagaacagatatataaataaataaaaagaacataaaaacgcaaataaaaacgaaaatgaggggaactttatgagccaaaatcaattcgaatgtcgtatttcagaagaagatgtacaaatgttaagagcgttagctcacccacttcgtctacgtctagtaatggaacttatgcaaagaggaacatgtaatgtaacacagctacaggaagtattagaaattccacaatcaactgtttcacaacatttaacgaagttaaagcaaaataaagtagtacgctttgaaagacgaggattagaagtgtattatcaaatccataatgataaagtaagtgcggtagtaaaaacattattttcttaaaatttgaatattatggaaaaagacgtgtagaatatacgtctttttttatttgtcagaaaggtagcgagagagtaaatattagcatgttaggaagaaatgactatcaatcaacatgctgccttacggaatatattctaaaaggaaaagaaaaaatagaaaggagtgtagtaagcaaaaggagggatagtagtatggatgtgaaacgtgtgaaacaaatcttatcttcttcaagtagaattgacgttacatatgagggcgtaccagtatggattgagagctgtgatgagcagaaggggagtgctcaagtgtatgatgtatctaatcctggtgagagcgttcatgtggacgtgacagctttagaggagaagtaataaaaaagacgcttctaattttagaagcgtctttttgttattccatcatatgtgcaattttcttagagaacataagaagtactaatcccagtacaattacgataataccgatgcttgcgaatacttctaaatatcctaaagattgagtgaaagcggctaattgtcctgctaataagtttgcgaagccagtaccagctaaccatacacccattaataatgatgctaatttaacaggagcgattgcacttaccatagataatccgattggtgataagaataactcaccgattgtgtggaacatgtaagtgaatacaatgaatagtaagtttgctttcattgtaatgttactttcatcgctaccagtttttaaaacagctaaagttagaactaaatatccaatccctagtaaaatcatacctaatgccatttttgttgggattttcaaatcgccattttttgtttttgaaagtttaatccataacgcagaaacaggtaatgctagtaagataatgaatagtgggtttacagattggaaccaaggtgttggaattgtaaatccaccaattgtacgatctacgaacttatctgtgtaaagtgttaaagaactaccagcttgctcaaatcctgcccagaagaatacaacgaaacaagttaaaattaaaattgcagcagtacgttttttctcttgtgttgttaaaggttttttctcaattgcttttgcatttttttctttagatttttttcctacaacagttgttccgatagaccctaagtaacgaggtgctaagaaattaaaggcaagctgcccaataatcataccgatacaagctgttaagaaaccgtatctataatctgcgaagtaaccgcaaatgaatggagcgataagagctcctaagttaatccccatgtagaagatagtgaaggcactatcacgacgagaatcgttttcgctatataattgacctaataaagtcgaaatatttggtttgaagaatccgttaccaataactaataatcctaatcctaagaaaagtccagtttttgtgttcattgagaataatacaaagttaccaattgccatgatgataccaccaatagtaatggcatgtcgcttcgtaatgaaatggtcagttaaccaaccaccaataataggtgtgaagtatactaacattgtgaaaataccgtaaatttgaactgcaactgctttatcaaatcctaaaccgccgcttactaagctcgttgttaaataaagaactaataagccacgcattccgtaataactaaatctttcccatgcctctgtaaagaacaacaagtataaccctggtggatgtttttttggtgattgttgctctccagctttgtctaattttaaagctgcatccatttttgtttccccctaatcctgtataacggatatttatgtaatcattttaatttacaaaatatttagaagtcaatagaattatatggaaatagaaagaaaatttctaaaaaagttctatttttcttcgaccgttactgtattttgccctgaaaacgagatgataagcgttttcaaatgtaataattgaattctaaaagaaaataaaatagtgattaatcagaaaatttagattaaaacatttattctgatataaagaaaaaatattctatttactttctcaatataacatattgggaataaaaatacaaaacgaaataatgtgacatttaagtgaattgaaaaataaccagctccacagaagggagctggttaaggaaatattatttaacaaagcgtttttcgatgtcatctaatagtaggttagcggccattacgccaccagctgtattccaaataacgtcatcaactttgtatgctttaccattttttactgcatttaaatttttaaatagaggatcgtttatatactctttttctagttcagatccttttttctcatttcctttatcgaatgtgaagtagaataatacgtcaccatccatagcagaaatacgctctttagatacgttacgctctgcaaaatcatctttattttgatctccaggacgtttaaatccaagttcttttaaaataacaccagagaatgtatcgccatgataaatacgaacatcaccaggcatgaaacgaaccatagagatttcttggtttactttatcaccaagtttgccttttaaatcttttatacgtgattcgtaatcagctacaactttttgaccttctttttctttatttaatgcttttgcataaaatttgaagttatctttccattcaccacgtaatgtatctgagaacacagtaggtgcaattgcttttagttgttcgtacactttttcgtggcgcattttattaccgataattaagtctggttttaaagaagcaattgtttcaacgttaacttgtccttcatcaccaacaacttttacatctttcattttatccttaatatgtggataccatgggtcaccagtccaagactttacagcaccaactggtttcacacctaattcaagtaaagcttcagttccttcatttgttaagataactacacgttttggattagcaggaacttctgttttacccattgcatgttcaaccgtaatcatttctttttttgtatcttctttcgtatttgattttccacaagcacttaaaagtagtgaaaaggctaataaaaatacaaatactgtaaacgaattttttcgcatgaaattcattatgtaccccctacatagtgagaatttttttcaatagcaagcatgatgttaagtctttatctttttattgtcaatacatatggatgaaaataattctcatttccgttgacaatgagaattaagttgaaatacactaacaacgtatcattatacattgaaggggaaacgctgcatgttattaaaaacaaatcgagcaaaatggattggattatttgttggaatcattgcagtcgttatttgtatttggggaagtattatttttggatatacaaatacgagttggaaactagcattggatgcttttttccattttaacggttccaatgaacatattattattcaaaacgtacgtctgcctagggcgttaattgcagctagtgttggtgctagtttagccattgctggttgtcttatgcaaactttaactaagaatccacttgcttctccagattttattggattaaattcaggtgctgcgttcttcatagttgtagcaattgtaatcttttcagtaacatcattatcagctttcacatggattgcctttttaggagcggcggttgcagctgtacttgtatttgcttctagttctttaggaaaagaaggaactactcctcttaagttaacgttagcaggggtcgcaattagtgcgttattttcatcattaacacaaggattacttgtgttaaatgaaaaagcacttgaagaggtattattttggcttgctggatctgtgcaagggagaaagttagaaattttacaatctgtattcccatatttattaataggatggattgcatctcttatgatggcagggaaagtaaatacattgatgatgggagaagacgtcgcgaaaggacttggacaacgaacaattttaatgaaatcattcgtgttacttattattgtactgttgtctggtggttcggttgcggttgctggcccaattggatttattggaattattaccccgcattttgccagatttctagttggagtagatcataggtggagagtaccgtatagcggtttattaggtgcaatactattaatcttagctgatatagcagcaagatatgtcattatgccacaagaagtaccagtaggagttatgacagcatttattggagctccattctttatttatattgcacgtaagagagggcttagcaaatgaaaaaatatattccgtttcgtatagggaaaggcgggccctcgtttttaatgtataaacgagcttgtctcgtcttatttagtttattagttgttttaataggattattttttgcgagtgcaggtatgggagacatgaaaattgctccttatgatgtatggcaagcgatcactggaaatggcgatgcgatgtctaacatggttgtaaataagtttcgtatgccgcgtattttaattgccatcctcgtaggaattgcgcttgctgtagcaggatgtattttacaaggtctcgttcgaaatccacttgcttctccggatatcatcgggattacgggcggggcaagtgttgcagttgtattgtttttagctatatttagtgataaaaataatgcgctaactgtaagcattcattatatgccgttagcagcctttgttggggcaacgattgtggcgctttttgtatatttatttgcatggagaaatgacgggttatcgccgattagtcttgttttaattggtgtggggttttgggcattaacgaaagcggcaacgactttgtttatgttgttagcaccaatttatcaagcgagtcaagcgaatgtatggattacaggtactgtttatggttcttcatggcaaaacgttatggtgcttgcaccgtgggttctcattttaacggtaatatcatttatagctgctagacatttaaatgcgcaagagctaggggatgatattgcggtaggacttggtgttcctttaacgaagtcacgcgtattcatgttattacttagtacggctttaattgggggagcagttgccttcgccggaggaattggatttgtcggtttaatggcacctcatatttcacgaaggctagttggttctttatacggtgcattactcccagttgcagctattgttggtgcaattctagtacttgctgcagatttaattgggcgtacagttttcacaccacttgaaattccagcaggggtatttacatcagcaattggtgcaccttattttatttatttactttataaaagtcggaattcataaagggagatgaatatgcaaaaagcattggagacgaaacgtttgacgttgtcttatggtgaaacaattattattgatgagttgaatttagaaattccaaaaggtgaaattacaatctttatcggttccaacggttgcgggaaatcaactttattacgttcactagctagattattaaagccaacaactggtgacattttgttagataatcaagctattcaaagtatgcaaactaagcaaattgctcgtcaaatggcaattttaccgcaaggaccgcaagcacctgaagggcttacagtattgcaacttgtaaaacaaggacgctatccatatcaaacatggctgaaacagtggtcagaaaaagatgaggaaatggtacagaaggcacttgcagcaacaggtatgacagaatttgctgagcgtgatgtgcatgctctttcaggtggacaacgacaacgtgcttggattgcaatgacgcttgcacaagatacagatattattttactggatgagcctactacatatttagatatgactcaccaaattgaggtgctagatttattattcgaattaaatgaaacagaacaaagaacaattgtcatggtattacacgatttaaatttagcatgtcgctatgcagataacattgtagccattcaagataaacaaatatatgcacaaggtaaacctgaagaagtggtagatgagaaactagtacgtgatgtattccgaatggagtgtcaaattagtacggatccgttgtttggaacaccgctttgtatacctcacggaagaggaagacgtgtagttaaagaagttgctcaggcaatgagataaaaaaacgatgagtgattcatcgtttttttatttggtacaagaaaataagaggaagagaggaatacgtaagcgacgtttatactcttcttcattttgaaaataggttggatttggtgtagcttcttttaatgatgtaatggtaaatccggcttgctgtaataatgtgaaataatcttccgttgtacgatgatatttaataacttcttggtcaatccatggttcaacccgtttgcctagtttaaagtaatcatcgacgagccaactcattcttttaccacttgtttgtaagctttcaaacgaagaagtaataacaggatgttgaacgctaaaggtaaaggtgccatttgtttttaaagtttgaaacacattttgaaaaatgctatcaagatgttcaatataatgtaaggcgagtctagatgttactaaatcaaaagtggaagaggggtaggtataatctttgaggtttaaaaaatgaacagttccatttttattttctagttgttttttagctttttcatacataagttcggagccttcaatgccggtgtaagagtagcatcccttttctaataattccgcgccaaacttagcatcaccacagcctaaatcgagaatttgttttcctcgtacatgaccaatgagctgaaagaatattggtttttcaatggattcatttgggctattttctcggtatcttcgtttcatatattgttcgaaaaatgctgtgttattgtatacatcagattctgtaaatgccatgtttgaaacctcctgaaatatttttttaattctatcaaatatgaaaagtaaataatagatttattgtaatgaatcatatataatctaaaattgtaagcggttactttaaactatttttctataataaattctgaaaacgtgttaagctagtagagggattattagaactattaagacaataatccgcttacatgaacgatgggaggcttcacgatgtctagtaaaacacttgcgaaatttttagaagaaaatttagaggatttaaaatcaaaggggctttataacgtaattgatccgcttgagagttcaaatggaccgatcattacaattggcggaaaagaatatattaacttatcttcaaacaactatcttggattagcaacagatagccgtttgcaagaagcagcaattggtgctattcataagtacggtgttggagcaggggctgttcgtacaattaacggtactttagatttgcatattaagttagaagaaacaattgcaaagtttaaacatacagaagcagcaattgcttatcaatcaggatttaactgtaatatggcagcgatttcagctgttatggataaaaatgatgcaattctttcagacgaattaaaccatgcttctattattgatggtagtcgtctatcaaaagcaaaaattattgtttataaacattcggatatggaagatttacgccaaaaagcaattgcggcgaaagaatcaggtctttacaataaattaatggtaattacagacggtgtcttttcaatggatggagatgttgcaaaactaccagaaattgttgagattgcagaagagttagatttaatgacatacgtagatgatgcacacggttcaggtgtacttggaaaaggtgcaggaactgtaaagcacttcggtctttctgataaagttgatttccaaattggtacattatcaaaagcaattggggtaattggtggatatgtagcagggaaacaaaacttaattgactggttaaaagttcgttcacgtccattcttattctctacagcattaacaccagctgatgcagcagcttgcatgagatcaattgaaatcttaatggaaagcacagagttacacgatcgcttatgggaaaatggccgctacttgaaacaaggattaaaagaacttggctttaacattggagaaagtgaaacgccaattacaccttgtatcattggggacgaagtattaacacaagaatttagtaaacgtctaaatgaagaaggggtatacgcaaaatctatcgtgttcccaactgtagcaaaaggaacagggcgcgttcgtaatatgcctacagcagctcatacgaaagaaatgttagatgaagcaattcttaagtatgaaaaagtaggaaaagaaatgggcatcatttaagtaacgacatcttttgaatagcttgcaaatgaggagtggggaaaatgaaaaaaattctagtaaccggttctttagggcaaattggttctgaactagtaatgaaacttcgtgatgtatacggcgcatcaaatgttattgcaacagatattcgtgaaacagatagtgaagtagtaacgtctggtccatttgaaacgttagatgtaacagatggacaaaaactacatgatatcgcaaagcgtaatgaagtagatacaattattcatttagcagctttactttcagcaacagcagaaaaaaatccgttattcgcatggaacttaaatatgggcggacttgtaaatgcattagaagcagctcgtgaattaaactgtaaattcttcacgccaagttctatcggtgcattcggtccatcgacgccaaaagataatacaccgcaagatacaattcagcgtcctactacgatgtatggggtaaacaaagtggcaggagaattactgtgtgattattatcatcaaaaatttggcgtagatacgcgcggtgtccgtttcccaggtttaatttcttacgtagctcctccaggaggcggaacgactgattatgcagttgaaatttattatgaggcaattaaaaaaggtgcatacacctcatacattgctgaaggaacgtacatggacatgatgtatatgcctgatgctttacaagcgatcatttcattaatggaagctgatccaagtaagctagtgcatagaaatgcatttaacattacagcaatgagcttcgagccagagcaaattgcagcgtcaattcgtaaacacattccgacgtttacaatggattatgcagtagatccagctcgtcaaacaatcgctgatagctggccaaactctattgacgcaactgcagcaatgaaagagtggggctttaaagcagaatacgatttagacaaaatgacaactgacatgctggctaagttaaaaaaaaagctcacagctgagttagtgatgaattaataggaagagtcgattcttaggaatcggctcttcattatttttgggaggagagaagtcttatgcaaagagttgatgtcgtatacgcactaatacatgacgaagaaacagataaaatattaatggtacataatgtagaacaaaacgtttggtcattgccaggtggggctgtggaaaaaggtgaaatattagaggaagcactaataagagaagtgaaagaagagacaggtttaaccgccttggctggggggcttgttgcgatcaatgaaaaattctttgaagaatcagggaatcatgcactattttttacattccgagcgaatgtagtaaaaggggaacttattgcggaagatgaaggtgaaatttctgcaatagagtgggtagatcgaacaattgcgaatgagcgtttcccatactatgacggaggatttgaatctttattagaagtagccattccatacaagtttcaaccagaaacaaagtaattgaacgaaaaaacaggagccataaggctcctattttctattcaatcgtcttcagtaatagttttttcagcaatggtttaatcttcaatcgtaaatcttcagcatgatttgcaactaagaagtgatggttataaatgtttttcatcaattgataagttgcttctttcgcttcgccttcttcgatgaagataccgattacttccataccacttttacgcgcgagtttaacagcttcatgcgtatctaaaattccgtcttgttgatagtctagcgcagaaggctcaccgtctgtgaagactagtaagaatttatgtttctcaggtcttttggcaagtttttcagaaacgatacgaataatatatccgtcgcggttatcttcttcttcacgaagttgcataatttctggaccaacgtttggcaacgttgagtttttataatttacaacttcatggataacgttcggcttatcttcaggtttagcgctagaggcatcttcccaaaatccgctaatagcgtgcgggatttttaaagactttaaagcttcatgaaatagtacaacactcttcttcgtttcttccattttgttatacatagaaccagaacagtcaactaatagttggaatgcaacatcgagttcttgtgactcttgtccttttttataaaacatacgcggttgtttttcggtataaatacgaaggaatttcttacgaagtcttccgtaatatttatcactattcgcattcgttttattttcaattgttttttcgataattttctttaattcttttacatctttattgacgactgatttgatagcttggtaatcttttttctcatctgagtttggtttgcgagcttctttaaatgtatgagaagcacctacattatacttaccgtatgcaccgtcgtgctggctagaagcgtgtgaagcccttgcttcttctgtatcagcgccatcaaagttggattgtgtacttttttgtgaggtaccttgtacagaaccaagtgcttggtcgccatcttctgattcacgggcagtatcacccatcatattagtttttgttccgctttctaattcaaagcgtaaaaagttctcgttttcgttatttttattttcacgatgccatgtggagaaactttcatccattttgtttttattttcatcgtcatctataagctgcgtatcatcatttgctaaatcttcgacgcgacagttcttttcgtctgcaaggacagataagtaaagtggagcatgtccgaaatagttgttaagcatatcgctttcaagaagcgcctctaagcgatagcgaattttctcaacgatatacataatatcttcagtattacgtgcttggaatgtttcatgtaaaatcgcttcaatttgctcaaaatattcattattaaacatttcgtatttatcgctagttaatgaaagatagcataggcaaaatagacgatcaccgtgataattacgaacacggtttatttcattttgagagccgaaataattgcggtacatttcttttcgacgtttaaaaacatgcttcgtgccaggacgtaagttctttacgatttcctcaacgcgtaaatcttctaatagaacaaataattgtgttaaaaacttttttaggggcgattcttgcaattcaatcgcataagagcgaattaaagtcatgtccgagtaatgtttattaccaagtgcttttaagaacacttcgctttttaatccgattactgtatcttcttcttttcgatcatcccaaaagtgactaatgacaactttcttttcaatttcgtcgtagtatgctttatagccatattcaagataggcatcgtcttcttttagaagggcatacattaagttttccatttgtagaaacagcgacgcatcaatttttttgtcactaaaaatttgtctcataaattatccctcaaagaaataactttctgctaattcacggacagtcatttgttctgtttcatcattaagttttgcaattatgcttcgttcaatcgctcgcataacaggaatatatacacctaaatcacatgcgtcgataataccacgaatacttgctgcttcttcacttacacgtccatcgcgagctaaaggcataaggtcgcttgcaaatgcaacaaacttttcaattgttgcaacatcatttaattttgattctgctaataatagttcttttaatgtatcaccttgaatgtaaggaacttcaataataacgaaacggttttttaacgcttcatttagttcacttgttccaacgtaaccttcgttaatcgcagcaattacacggtattcgtcatcaccgtatacaacctcttgtgtaaatgggtttgtaatcattttacggtaatctaatgcgccgtgaagaagtggtaacgtttcaggttttgccatattgatttcgtcaatatataggaagtgaccgttcttcattgctttcataagaggaccgttaacgaatgaaacttcagatgcaccatctttcgtttgtagtgtgttgtatcctaaaataccctctacatctaagtcgacagagcagttaatgctatgcattggtttttggaataaagaagaaagagtttccgctagtactgttttaccactaccagtcggtccttttaatagaatattcttgccaagaagaagtgctgtaatcgcatcttcaataatgctattatcagacgctttatatattttcgttccgattaaatgtgcattttcaccagcttcttgtttattcttttcatgaatcgtagaaagctgttgttttaaatcagcatgtatatgaaattgttctaacatgtatttcccacctaacattattttcataaagtaatacatcttatgataacttgttttaatatggtatgcaaagaaaaggaaggaggataaagggaaaagaaaaagcaatcaagatgaagttgattgcctacagtaaaggagaaatgagcctcatgaaagactccaatatgcgtttttttatacttcttttttggaaagagttccatttaatttcagttgaatgtttaaaatcttcttcaaaatcacgtttaatgtcgtgaactgtttttgattcataaagaacgctaataatttcgtaattcaattcaaagctacgtacatccatgttcgctgttccaatagttgcaattgtatcatcaacgagtacaatttttgcatgcataaaaccatctttataactgtaaatagaagcaccagcttttaaaagcggagtgaaataggattgagatgcttgatcactaatgatgctatcacttttacctggatataaaatccgtacatctattccggcaattgcacttaagcgtaataatgttaaagtttcttgatctggaataaagtagggtgtagcgatccaaatggatttttttgcagagcccataacagctaataatgtattacgaatacttttatcatcggagcttggtccgcttgctacgatttgaacagcaccttctgcatttgaaatctctttacctgggaagtattgtctattcatgaattgatcccaggaataagtatttaaaccactagaggcatagagccagtcttctagaaagattgcttgtaatttatataatgcttttccttctatttttaaatgactatcacgccaaacaggaaatttcttggaacggccaagatattcatcaccgacattgagtcctccggtaaaaccaatttttccatctacaataacaatttttcgatggttacgataattgacagtttcaagtaaccaagctgaaaaaatagggtcaaattctacaatttcaatcccagcttctttcataggttgcaaaaatcgtcgtcgtaacgtattacttccaaggccatcataaaggaagcgtacaataacaccatcttttgctttttgtattaaagcatctcgaacttttgtaccaatttcatcagatttataaatgtagtattgaatatgtatatgatgctttgcctgctctatagctcgcaaaatctctgaaaatgtttgatctccgtttgttaaaagttttgtagttgttttatctgcggcaggaccacctccaaatttttgtatgacttctgttaaatgtatggaacgttcatttagtgggactgtgagtaataactctagtcttcttccttctaatatttcacggaataattttctttgttcttctgaacgatggagatgtttttttcttctccagcggctgcgtccgaaaatagcgtataaaagcacacctataataggaagaagtgctaatactaaaaaccatgctaacgtactttgtggagatctattttctataaaaataacgaatgaaattccgacaattgtgatggaccatagagcaccgacaaatgtatataacgaaatatacgatgtatttaataggaacagaacgatagatacaattgtaaatattaatagtaattgaacgataggcttcttcatttctatataattcccctaatcttttttcaatatagacttcttaaatagaagatgtaatatgacatctttattataaggtgttttgctttttttacaaaatatagacatttcacctatactttccgcatttgtcctacatacagtgtactatcccattttttatcccactcttaacgcatatgaaaatgaaaaaatcgaaaaggagcggagaaacatgaattatatagaaaataatggattgtactatcgaaatcatcatcatggtggacatcatcaccatggaggacacaatcactatgatcaccatcatcatcacggaggcggatggggctggggtggtggtagttcatggggaggcggatttttccctggaagctttgcaggaggagtgttaggcggactgacagctggtgcattaacaggtgcaacaagtggaggatattatccggctccatatccagtagcttatccatcaccataccctgtaacgtatccaatgccatacccaggttatcagcaaataccatattcgtattaaactaaaaaagaggctatcctcttttttagtttaatacagtatttatttataaaataattccaaagttaaggtggaaatatgttaatattttgttattgtaattcaaaaacatgcacattaatgtagattttcatattattatttgtgaatagttatgtagtatgatctaatttctatttcgttattaaaaacaaagagatcagatatgagtggtattagttggaaacaaggcttgcatagagctacttaaaaggattgcggtataataaggcgcgaagtaattagagatatgggaagctaccagttataattgaaacggtataatattgctttttattacaaataatattatgttattttaatcggtttatttaaaaagataatttatgtaaagggctagtattagaaaatgaaatatctctatttctatgaagagaaacaggttgtgttttagtcagatagaagcaaggagagatgcgcatgctagaacagagaggtcatgcattatatgactcttcgttgcgagatttaaagttagcattagatgagtcttcaattgttgcaattacagatcgaaaaggtcttattacatatgtaaatgataaattttgtgaaatctctaaatacaaaagagaagaattaattggaaaagatcaccgtattttaaattcaggtcatcatccgaaaaccttttttcaaaacttatggaaacgtattttgaatgggaaagtatggacaggtgagattcggaatcgagcaaaagatggtacatattattgggtcaaaacaacaattgttccatttttaaatgaaaaaggagagccttaccagtttatcgcaatacgaaatgatattagtagtagaaaagaagcggaacagaggttgcggctaagtgaaagtcgttatagggaacttgcctatcatgatgctttaacgagtttgccgaaccgtttgcaattaataacgaccgttaataaattgattgcagataaaaaagaatttggtatgatttactttgatttggaccgttttaaattagtaaatgatacgttaggtcatatgataggggacttacttttaagcgaagtcgcttcaaggttgcattatgtactaggagagaaagatgttctggctaggctaggtggcgacgaatttgtgctgttaacaaaaaatcatagacaagatgatatgaggcagttagcgacatctgtgttgtcatgtttccaggcaccatttattcttgaaggccatgaagtatatatttcagctagtctaggactttgttcttatccacaagacggacaagacgtggaaacattattgaaaaactccgacttagctatgtatagtgcaaaagaacaggggagaaatgctgcatgtttctttacagatgagctacgcgcgaaaataaatcgtagaatgaaagttgagtttgctttgcaaaaggcaattcgtgatgaagagttagatgtagtattgcagcctattattgatttgaaaacgaagagatattctggtatagaagctctagtacgctgtatgacagaagacggacctatttcaccaaacgaatttatcccggtagctgaagagtctggacttattataaagctaggagactgggtattagaaaaatcgtgccgattgtttaaaacattgcccaattatcaagaaggactaaagttatcagtgaatttatctatacaacaattaatgcagaaacgttttattttctctgtacgtagcattttaaagagaactggttttcctccgaaccgtttaatattagaaataacggaaagcatagcagtccgccattttgattatattattgctacattacaagaattaagaaatatgggtgttttaattgctttggatgatttcggaactggctattcttccttatattatttaaaacaactaccactggatattgtaaaaattgatcgtaattttattcgtgaatttcattatgatcacgcacaaccagaacgaacgattgtaaaatccgttattgaaattgctcatagtttaaatttagcagtagttgctgaaggagtagaaacagtagagcaagagagtttgttacaatcaatgagctgtgattatgtacagggattttattatgcgaaacctttatctgtaggagagctaaaagaaaagttaattacagatttttaataaaaaagagaagccagcagcttctctttatttaatccgttttttgtgagtctttcattagtattggataaagaataagacctaatacgaacaatccaattcctaagaagaatgtttttaaatcagcagttcccgttttgataacccaaatagagtataccaacgctaatgtcgtaatgattccatcttttactcgagatccgggcagtatatcatacgtttctcctgtaataactaattttaattggtacaaggtagaaacaaggtatggaattaaataggctaatgttgctacgacgatagcgaaactatacgcttctgaaacagtaccagaaatcgttgaaaataagaaaatttgcgtcattatatttgtaatcaatagtgattttgaaggactaccttttttatttgttttcccgaaaaacttagggaaaagtccattttttgctgcctggtaaggtacttctgaactaacaacaatccagccaactgtagatccaaataaagatataagagcgagtaaagccattatatatgcacctttatttccaattgctaaatttaatgcgtctactaatggtttttgagactcttttaaagcatcttgcggaagagctcccattgtaagtaaagtaattgacatgtaaataagaagagcgataattaatccgaaaatcgtagctttttttacatcgcgctgtgattttgcacgattagaaagcataactgctgattcaataccgataaatgcccagagtgttgcaatagcagctgaattgatttggccacctaatgagattgattgtcctgcttcattcataaaggtttgaccgtctccgaaattagaggcgttgaaaatgaacaatgtaattacaataaacattgtaaatccaataatttttgcaatagtagcaagtagattcatatttccagctcgatcaatattttgcgaaagaatatattgaattccccacagcataaggctacatacgaggaaagttaatccttttccgagctccagtgaaaatccatttattgaaaaaagaatttgcttactttgtaaaactggaaagaatgttgataaatatccagcaaaggaaataataacagatgctgttgcagcccagttagcagcccaatatccccatgccatactatatcctgcaactttaccagctttttttgaaggaaacatcgcttgagcatagctttgtggtccagcttttaattctggtttccgaatcgctaaatttccaaatacaagtgcaatcataaatacgccaaggcctgtaatactccatgcgagtgtagaacccattggacctgatacttgtgctaaatttgctggaagcataaatacgccaccgccaaccatattcccgataacaaatgctgttaaaacccataatccccactttttcgtttccatttttgttaactcctttgtagtaagttttgcttaaacatcattttttactagctttttgacaataaaaaaagagccatgtagataaaaaaatacctacatggctcttttgccaaagcgtaggtacaacgggaataacccttgtacctacgcgtaatttttccgctaggtttcaagggttacgtatgatgatgatgtttttgtgcaaatgtaactacagttgttgtataagtaagcatagttctttgctccctttctcctctgattttgaagttagtatactacatgtttttttgaatgaaaagaaaaatataaaaatttttataaaaatacgttttaaagattaaatatttacctatatttttcttgtactggaaaataagtgagagattggcagaagagtgaagcatgttataatacatatagaattagaaggtgacaaggggctagtgtagatgatgagtaagtatgaacaaatttatacagaaatcagtaaatctattgataataaacaattaaaagagggatgcaaaatcccatcagaaacagaattaatgaagcagtatgaggcaagccgaggaacggtaagaaaagctgtagatttactgcaagagcgtggatatgtgcaaaaaattcatggaaaaggtgtttttgttttaaagcgaaaaaatattgaatttaattttggcggtattgtaagtttccaagaagaaaatgaacgtttaggacgtcattgtattacagaagttgtggaaatggacaaagaaaaagccacaaaagaaattgcaaaattattaaatgtaaaagaaaaaacagagattgaccatattaaacgtgtacgaaatattgatggagaaaaagtaattttagatataaatcattttgtatctgagtttgttccaggattaacgaaagaaattgcaactgcatcgatttataaatacatcgagaaagagcttgggctacatattagttattcgcagagagtaattgaagtacagccatgtacagaggacgatagaaagtacttagatttaaatggaacagactatgttgtcgttgtgaaaaactttacacatttgtatgatggaagtcagtttgaatatacagaatcacgccatcgtttagatatttttcacttttcggatgtggcacgcaggaagtaaagaggtggaacaaaatattgtttcatctcttttttttataaaaaaaaaacataaactcgtatatacgagtgttgactaacttatatatacgagttaatatgtaattgtaaacggtatcaaaaaaagaaaagagggacgggaatatggggaaagactatcgtaaaacagcagaggaagtgttgcagtatattggtgggaaagacaatattgaacaagctgcacattgtgtgacgaggctccgtatcgctttaaaagatgaaagcaaaatagataatgataaattacagtctgtttcattagtgaaaggagcgtttcataacgctgggatatttcaaattgtaattggtccaggggatgtagatcgtgtttacgctgagttgataacgcttgcaggtatgaaagaatcgactgtagctgacgtaaaagactctggaaatcagaagttaaatccagctcaaaagtttgtgaaaatattttcggatgtatttatgccgatattaccagcgatcgtaacagctggtttactaatgggtattaacaatctattaggcgcaaaggacttattttttgatggaaaaaatttattagatgtttatccgaacttaggcgggctttgggatttaattaatatgatggccaatacagcattcgtattcttaccagcacttgtcggttggtcagcaacgaagcgttttggtggtagtccaatactagggattgttatgggattaatgcttgtgcacccggccttattaaacgcttgggactatggaaaagcagcgactggtttagagggtcaaaagattgagtacttcaatattttaggactgttccaaattgagaaggtaggatatcaaggacaaattttacctgttttagtagcagcatttgtattaagtaaagtggaaattttcttaaagaaacatgtaccaaatgcaattcaattactagttgtaccaattacaacaatcgttgtgacaggtgtgttagcgttaggaattatcggtccggttacacgtcatattggagatttattaacagtaggattagtaggtgtatatgaaacagtaccagtagttggagcagtattatttggagcgttatatgcaccgctcgtaattacaggtatgcatcatatgtttattgcaattgatttacaattgattgcacaacatggcggtacatttatttggccgatgattgctctttctaacattgcgcaaggtagtgcggcacttgcgatgttctggatttctaaaaatcaaaatgataaaagtatggcatcaacatcagccatttcagcatacttcggtattacagaaccagcgatgtttggtgtgaatttacgaaataagttcccgttttatgcagcgattatagggtctgctgtggcagcgatattcattacattaaatggtgtattagcacctgctatcggaattgggggattgccagcatttatttctatcattccgaaatcgattccaatgtttattgtcggaatgattattgcagttgtaatcccatttactttaacatggttatttgcaaaaagagtgaaacagaagtaggaggaagttaaacatgaaggattggcataaaagtgtagtatatcaaatttatccgaagagctttaatagttattacaatagagaaaccggtgatataaaaggggttacagagaaactagattatttaaaagaactcggagtggattatatttggttaacaccgatataccaatcaccacaaaatgataatggatatgatgtaagtgattattacagcattgatccatcttacggaacgatggaagagtttgaagaacttttagcagaagcgaaagtacgtaacattgaaattatgcttgatattgttgtaaatcatagttcgactgaacataagtggtttaaagaagcgaaggaagataaaaatagtccatatcgtaattactatatttggcgtgatgaaaaaaataattggcagtctaagtttggtggatctgcttggaaatatgatgagaagacggagcaatattatttacatctatttgatgaaacacaagctgatttaaattgggaaaatgaaaaactgcgtgaagaagtatatgatatgatgcgcttttggctggataaaggggtaacgggattccgattagatgtcattaacttaatttcaaaagaccaatgttttttaaacgatgaaggtagtactgcgacaagtgatggacgcaagtattatacagatggcccgcgtgttcatgaatatttacaagagatgaaccgaaatgtttttgcaggaaaagatgtcattacagttggagaaatgtcatctacgacaattgataattgtattaaatattctaatcctgagcgtaatgaattaagcatgacgtttagtttccatcatttaaaagtagattatccgaatggtgataagtggacgaaagcagagtttgattttattaaattaaaagagattatgtctaactggcaaattgaaatgcaaaagggcggaggatggaatgcgttattttggtgtaatcatgaccagcctcgcatcgtgtcacgctttggtgatgatggaaagtaccgaaacgaatctgcaaaaatgttagcgacagccatgcacatgctgcaaggaacgccttatatttatcaaggggaagaaatcggtatgacgaatcctaaatttgagtccatcgagcaatatcgtgatgtagaatcgttaaatatatacgatataaagctaaaagaagggctatcaaaagaagagattatagggattttaaagcaaaaatctcgtgacaactctcgcactccgatgcagtggaatgaagagatgaacagtggttttacaacaagtacaccttggatttcagcggctgaaaattttaaagaaataaacgtagagaaggcattagaagataaagagtccgtattttatcattataaaaagttaatagagcttagaaaaacgtatgatgtaattacagaaggagaatatgctattttggataaaaatgatcctaaaatttgggcatatactcgtactaaagaaagtgaagtgctacttgttataaataacttctatggagaagaaataacgtattcagtaccagcgcacgttcagttagatggaatgaaacaagaagtactactgtcgaattataaagatgccagcaaggatattgcaaaacttaacttaagaccatatgaatcaattgtgtatcgatatacgaaataaaaaggttgtatgcccgagcggcatacaacctttttattttaagacaccactatacaaaatgcttacttctacttcaggtttgaattttacttttgcataatctttattccaattttttttcttccataagttaggatgataagcgataagatgtcttccaataccgaaagcatcacaatttgctttttgtagttttcgtgttatttttttcgcttctttcgtgagttgtttagaaagttctttatttagtttttctctatcgtccattgtatacatattatctcttggagattcaagtgctataacttttaattggagcttaatgtgagcataaacatttccttttttatctgttgttatttttaagtcgcgttttaattttcgattactaatttccattgttaaataatcagatgtcttctcagattcatcactagtcagtttttgggttatacgggcacttgttcccatttttccggttaataacacgaataaaacagattgttgcaaaggtaaatgcccagttaatttatcattgttaaataaagctaacccgtttgtaactacttcttttccttttatttttatagaaggaagggtaaagtctttaccgggatctaacatttttgtagcagctgtttctaaagtttcttttggaaatacactcatatcttctaagcttttcacttttttctttagaaaatctccaattagtaaatttcctattttctttttttcgagtatctccgatgtttcaccatctactgcaataagttttactaaagcagttgggtttgttggatctcgaaagctgacatctaaataggggagtatacccttttttagaattttggttccgagtaattgaacaccatatttaaaatagcgaatattcccagtcacatttttttttagggcatcgcctgtatccattatgttatgcccggttgctgaatatatttcattctcaaatgaagattgctctccgcttgaactttttacaagctcgattgtttgctggagtttattctcttccgtaatatcagctccaacgctataagctaaacttgcctcccttaatggttcttgatcccaacagccagaaaggagggaactagtacataatattaaaagtaatttaactctttttgggaacatactgttctcctttcttctttcttattattgaataaagtagaaataaaagagggaggacaacgatgaaaatataggtgaacttatcagtgaaagttgaaattacttttaattcttcaggtgtatctataaataaggctacactaaaagcaataataccaacgattggaacagcctttttatgattagcaaggttgaatatatgtccaattccgattgaagcagcgcagtaataactagcaatagaagcgacaactgttatcatccaaattgggatgaagattaggtccgttcgatctataattccaatatgcaaggagcgtaataagtaagcaactggctctggaataagctcaatttgctttggactaaatacgataaagcaaatccaaacggtaaaagtataaaaaagagttacaaatccattggcgatagaaatggccttcagttttgcaatagaactcccatttacttttgggaaagcgataagaataatttcaaaaccatacatggctgtaattgtttccttggatgcttgaattatattccaccatccggcttctgtaataggaaaaatataagagaaatcagctcgtgaaagccctagggcaattaaaagggccattggaataatgagaatagaggccatgacataaaatcgtacgatgactttaaatgtgttataagctacataacaacaagctactgtacataatatgagaattgcagaccacggagttgcgtgtaaaacccatactttaatgacgttacaagcattcaacataaccgtcataccgataagggtaaaataaaaaacataagaaaagcccaatagttttcctaacttattaccaaatagcatacaaacacttttatacatatctgcatcaggaaatcgttttaagaaaagccacataagtaaaataataagttgaatggcaagccccgcgatgagcgcagaaatccaaccaccaccttttgctatcggatgaagccggttaggtagagatagtataccgaccccaatttggcattgaataacgaaaaaggtaaattgaacaagtgaaattttactttgcgtgtttgtcaccgtcctcatcctctctcgttacatgttggcgctgcatttttttcggttttggatcatgtggtctttcccaaaatgaccaaattggtagtcttatgaaagaatctttcatatctttaatccgcatcggggcaacaggagaaagatatggtgtatgaaatgaatgaagctgacataagtgaacgaaagttataatgagaccgaatgatattcctacatatccgaatatggcagcaaggagcattaatggaaaacgaagaatccgaactgctgaactcatatcgtttgatggaacgagaaaagatgagattgcagttaaagctacaacgatgatcattgtgtaagaaacgagtccagcttttacaattgcatccccaattactaaaccacctacaataccgattgtttgtccaacgcggctcggcaagcgaataccagcttctcgtaataactcgaaaattaactccattaagagagcttcaaaaataggaggaagcggtactttctctaatgaagctttaatcgtatacacaagttcgagcggtaacacatcaggatgaaaagcaacagttgcaatatataaagctggtaagagaaaggcaattaaaaaacttactaagcgaatcattcggacgaaagaaccgacaatccaacggttattataatcatctggtgattgatagaaagcaaataacgtaacaggaacgatgagcgctgttggatctccatcagataaaatagcaacacgcccttccattaaattagcaacagttctatctggacgctctgtatttaattgctgcggaaatggggagaaagacgtatcctctataaattcttgtatgtatcctggtggcataagtgcatccgttttaatggtttccaatcttcttttcacttctataactaaatcgtcattcgctatattttgcatataagtaattgccactttcgtgtgcatttcttcaccgagtgtaaaatacttaacaactaaatttggactcttaatgagtttacgaatagaggttaaattagttgctagatcctctacaaaaccagtatgtggaccgcgcacaactccttcattatcaggctctgctatatctctctttaaagataaggttgtttcgaaaatacaaaaactgtcgacgtgttcatgaaaatataaggatttaccttgtaataaaagttgtatcccataatttaaattcgtttcttttttcatatttaacgtagaaaaagctttatctaaagataaagctgatcgcgttaataatggctcaaggactaactgatgaattagatttggatctgctaaagattcgatatataagattgctccttttccgttttgaaaagggagatctaatttttttatatcatcagaatgagaaagtttattttcaatgtaattaatgttctccggaagtgatggaaacatatgcttttggtttttactctcttgttgttctttttgctctgtcataatttccacctctcttaaagtgcaattgtttctgttaatttttgtcgtttgtgagaaatttatgcttgaattattttaaaaaaagaggattgaaggttacgttacattgtcttttgtgcattattcaatttcatagcagtacttctaacatttgtgtcgaattaagaagatatataggagggatacatatggaaatagctgtagaacgtgtttttacaaaagagattttaaaaagagcagcgagtttgtttcatgtaacagtggaagaaaagccacttggagattttgaaaattatatttttaaggcaaagggtgattgtggcgaagattacgtattgcgtttaactcactcttctcatcgctccaaaaaagaggtagaggctgaactagattttttacgatatgttgcggagaatggggcaaaggtagcaggacctctttattcaacgtctcaaaatcttgtagaagaaatcgtagcagaggatgaaactttctttttcgcttccttatttacatatgcaaaaggtgagcaagtaaaaggagaggaatcgccttattggggcgagcctctctttgaagcatggggaaaagcgattgggcaactgcatcgccttacaatggaatatcctaaaacagactatcgtgatacgtgggaagaagacgagagtgggattgttaatgaactagaagatgatcaagtgaaaaaaatcgctgcggtattaatggatgagataaaggctctttcaattgaaagagaaacgttcggccttatgcacggggatattcatccaggtaattttcattatgatggtaaagagttaacaatctttgattttgatgatgcagcttataattactttatacatgatttagcgatggttctttattactctgttctatttacaccgtggacagcagaagagaagacagattttgctcgtaaacagttacaagtgttacgaaaaggatatgagtatgagcacaggctggcggatagttggtatgaatcgttgccactatttttacgtttacgtgatataggtttatatggaacgcttcagaagaagtttaaagggaaagatatgcctgataacttcttgaaattatcagaagagctatacgaaagaattattaaaagagaagcaattgtgaatatataatacatttagttcaaaacaaagtatataaaacaaatatatactttgtttttttatacaaaaatatgtttactttattaaaataatattgtcctagattcggtatgcacttataattttatatatattctgaatattctttataaagaaggagggggaatgttgggaactttcgtaaattggttaaataatattgtttggagtccagcacttgtttatttatgtttaggagtaggtttatatttttctattcgaacgaagtttttacaagtaaggcacgtaggagaaatggtgaagctgacatttcaaggagaaaaatcagaggctggtgtttcttcattccaagcgttagcactttcgttatcaggacgtgttggaacagggaatatcgctggggtagcaacagcggttgcattcggtggaccaggagctgtattttggatgtgggcagtagcctttttaggggcaggatcagcttatgtagaatcaacactcgcgcaaatatataagacgaaacatcaagggcagtttcgtggtggacctgcttattacatcgaaaaaggtctaggagttaaatggtatgctttagtattcgttgcagcgacaattcttgcaacaggacttttactaccaggcgtacaagcaaatagtattgctgtaagtttagaaacggcttttggtattaatactaccgcatcaggggctatattagttgtcgtattagctcttatcattttcggtggagtaaagcgaattgttaacgtagcgcaagttgtcgtaccttttatggcaataggctatattttagtagcttgcgtcattgttgctatgaatattgaaaaattgccagaagcatttatgttaattataagaagtgcatttgcattagaagctgctttcggtggtattatcggtttagcaatctcttggggggtaaaacgtggtatttattccaatgaagcaggacaagggactggaccacacgcagcagcagcagccgaagtatcacatccagctaagcaaggtttagtgcaagcattttccgtttacattgatacattatttgtttgttcagcaacagcatttatgatgattattacaggcatgtataacgtatttgatgcaagcggaaaaaactttatcgttaataaactaaatggtgctcagccaggaccaggatatacacaggcggcggtagaatctgttttccctggatttggaaacggtttcgttgcaatctcgttattattcttcgcgtttacaacaattatggcgtattactacattgcagaaacgaatattgcgtacttaaatcgtgataaagaccgtccttggatgtctatggtactaaagtttgtatttttaggagctgtattctatggatgtataaaaacagcagcaacggcttgggctttaggcgacattggggtaggaattatggcatgggtaaatatcattgcgattttactattacaaaaacctgcattagtcgcattaaaggattatgaaaaacagaaaaaagaaggaaaagatccagtattcgatccaaggccattaggaattaaaaatgctgatttttgggagcatgaatacgggaaagataagaaagaagaagtatcttaacagaatagaaatgaagaagcaaaggggaaactctttgcttttttttatggacaaattgaagctaaaagttatttttgggactatttttgaatataaaaagaatgtacatgcattgttaggggaagggggagtatgttgatagaatttcgtaatgtaaataaatattatggtaactttcaagttttgaaaaatattaatgtgcaagtgaaaaaaggcgaagtggtagtagttgtcgggccttcaggatcaggaaaaagtacattgcttcgatgtataaatcaattagaggcaattacagatggagaattaattgtacaaaatacagaggtacacaataaaaaaacggacatgaatgaattgcggcgaaatattgggatggtctttcaacatttttatttatatccacataaaacggttcttcaaaatattacattagcaccgattaaagtaaataaagtttccaaagaagaagcagagaaaacagcaatgttttatttagagaaagtaggaatcccggagaaggctaacgtatatccacatcaattatccggaggacaacagcaacgggtggcaattgctagaggacttgcaatgcagccggaaattatgctattcgatgagcctacgtctgctcttgatccagagatgattggagaggtacttgatgttatgaaagcactggctaaagaagggatgacaatggtcgttgtcacgcatgaaatgggatttgctagagaggtagcagataggatcttatttatggatgatggtcaaattattgaagatacaacaccggcgcacttttttgtaaaccctgaacaagaaagagctcgtttatttttaagtcgggtgctaaatcattagaggaggaatttcatgcttaaaatgaaaaaattatttactttaatcgtattttcatgtttattcgtgcttgttgttgctggttgcggaagtaagaaagatgaggcaaaggaaacaaatacgaagcaaggcggggctgttgagcaaattaagaaacgagggaaattagtagttggggtgaagaatgatacgaatttatttggattaaaaaatccttcaacagggcaggtagaaggattcgatgttgatgtcgcgaaggcacttgcgaaaaagattcttggagatgaaaagaagctagagctgaaagaagtaacgtctaaaacacgtattccaatgctgaaaaatggtgatattgatgcaattattgcaacaatgacaattacggaagaacgcaaaaaagaagtggatttttcagatgtatattttaaagcaggacaatcgttacttgtgaaaaaaggaagcaatattaagagtgtcgatgatataaaacaaggcgttaaagtattagctgtaaaaggatcaacatctacaaataacattcgtcaaaagtcaccagaagcgactgtattagagtttgaaaattatagtgaggcatttacagcgttaaaggcaggtaaaggtgatgtgttaacgacagataatgcgatcctttacggaatggcaaaacaagattctaattatgaagtagtaggaaaaattttcacagatgaaccatacggaattgcagtgcaaaaaggggcagatgatttaacgaaagagattaatactttaattaaagacatgaaagcaagcggggagtatgacaaattatatgagaagtggattggacaaaaaccagaaaagtagatagtaaaagtgagaggatgagagtgctcatcctcttcttgtaaagaaagaggggagaatatgtgcctgatttttctatattaacgaataacattgatatgtatttagaaggatttaaatatacagttatgtctagtgtaattgcattgataggcagttttattttaggagtaattttggcagtaatgcgtattgcacctattcgtattttaaattggataggatcagcttttgtggagtttgtaagaaatattccactcgtattaattgcatttatattctattttgctttacctgtaataggaattactttaaatggttttgtagcaggaacagttacgcttacggtatatacggcagcttttattgcagaagtaattcgcgctggtattttatcagttgcgaaagggcaaatggaagctgcccgctcttcagggctaacgtatgtgcaggcgatgtattatgttgtcttaccccaagcagtgaaaattgtaattccccctttaggaaaccagtttctcaatttagttaaaaactcctcaatacttggaattattgctggtgctgatttaatgtatcaaggagatttaatttcaacgaagacgtttgttacgtttgatgtttatatatttgtcgggatgttttatttaatattaacaattccgctcagtatgctagtgcgttatttagaaaaacgcttggcaaaggaggcggtgtaaatggatttcaagggagcaattacaggagatcatattctatttttattaaaaggattacttataacattagaggtagcgctcatagcaattgtacttagttttattattggaagtgtaatcggtatattgcgctacacgaaaatacctgtcgtctcacaaatattaggagttatagttgaagtgattcgaaacttaccactactgttaattatatttttcacgtattttgcacttccagaagcaggcttgaaattagaaattataacagctgcaattgttgctttaacaatatttgaggcagcaatgatatctgaaattgttagaagtggtttattgtctattgaaaaagggcaggttgaagccgcaagatcttcgggattaacttatgtgcaagcgctttggcatattattttgccacaagcattaaggagaatggttccgccgcttgtcagtcaatttatttcattgctgaaggatacgtcgctagcggttgttatatcactccctgagcttatgcataatgctcaaattattagcgggcaaaatgtgaattacatgattccaacatttatattagtagcttgtatgtactttatcgtaaattatagtttatcaattttatcgagaagattagaacttcgttgactcttacaatatatgtaagggttttttccttgtttctccttattttcctctaaatagaatctaaatcttgcaataattcgatttttatattattttatcagaaaagttttaattttatatagaaaatgtaatcgctttcgtgtatatttttattatcagaaaattttaacaagatataggggtattggtagggggaggatttagatgcagcaaccaacgaatgagaaattacatcgtacgatgaagagtagacatttatttatgatcgcacttggtggtgtaatcggaactggtttcttcttaggttcaggttacaccattaatcaggctggaccagggggagccatcctttcatatttagtaggcggatttattatgtatttaacaatgctttgtcttggagagttaacggtagcaatgccagtttcaggttctttccaaaagtatgcaacgaagtttattggaccaggaacgggctttatgattggctggttatactggcttggctgggcagtaacagtgggtctagaattaacgtcaataggtttaatgatgaaaagatggtttccaaatgttgatgtttgggtatggtgccttgtattcggtgttattttatatgcttcaaacgcaatttcggcaaaaagttatgctgaattagaattttggttttctagtattaaagtagttaccattcttgcctttgttgttcttggtggtagtgcattattagggtttatatcatatgacggaaaagaagcagcacctcttttctctaactttgtaagcgatggtggattatttccgaatggactagctgccgtattacttacgatgattacagttaacttctcgttccaaggaacagagttaatcgggattgcagcgggagaaagtgaaaatccagaaaaaacaattccacgcgcgatccgtaatacagtatggcgcattatgttattcttcattttaacaatgacgattttagtagggttaatttcttggaaagaagctggcgtaattgaaagtccattcgtagtcgtatttgataaaatcggtattccgtatgcagctgatattatgaatttcgttattattacagcgttactatctgtagcgaattcaggattatatgcggcaactcgtatactatggtcacttgcaaatgaaggaatggcaccaaagtctttccaaaaagtaaataaacgtggtattccaattacagcgttagttgtaacaattgctgtagctgctttatctttattaacaagcttccttgcagaagatacagtatacatgtacttattatctatagctggtttatcagctgtttcaagttggatcattattgctttatcgcaacttcgctttagaagtcagtatataaaaggcggaggaaagttagaggacttaaagtatagaacaccactatacccaatcgttccaattttagctttaattacaaatagtatcgttgttattagtttagcgtttattccagaacaaagaatggcgttatactgtggtattccatttatcattttctgctatatatattattatattagtaagaaacggcagaaaccgatgaaagtggagatggaaaaaacaaatgaaactaacaatcaaacacgatgatatagaagcagatttatcgtatggtcaattagcgattggaaaagaaaacggttattcaccgttacaattactcgtttcttctatcgcagggtgtagtgcaattgtctttcgaacgattttagaaaagaaacgtattccatacgatacgtttacaatcgaaactgaaattggtagaagtgaagcgttatcgaagccagttgaaagtgttcatttgcactataaaattaaagcgcaaaatattacagaagagcagctggacaaggcgctgcaacttgcagtgaaaaattgtacgattgttcaatctgtaaaagatagtataaaggttacggaaacaattgaactaataaaatgaaacataaaaacgtgagaatacggctctcacgtttttatgtttttaataaagggggaaatatgatggaatgtttagggtgtaaattagcaggcggagaggaaattatatatataatatatgaagatgattatgtaacttgctttttagatcatgcgcctttctacccaggacatactttaattgtgccaaagcaacatgttgtagaagtagatgaattaaatgatgttgtagcaaaatccgttatggatgcttctaagcttattgcaaaagcgattaagatagtatataaacctgacggagttacagtttgtcaaaatggtggagtatttaacgagttaacacattatcatatgcatgtcgtaccaagatataaagagcgttcgtttgctgagttttatatggtacaaccaggagaaaagcagaatcataacttggaagagacacagaatttgttaaaagaagcgatagagcatatgctgcttactgaaaaggcgtagcggtcaggaaaattctaatattaaaaagcccaatttctcagttaaaatagagaaattgggcttttgtttattctattattaaattttatacataaaaagattttgcagtgtcacaaagtatagcgcttattcgttatatagagtgagaggaggaattatatgaaagttacaaacaacgattatgaaaagatggaagagctatatgagttgtatgaacaaaagatttattatgtagcgtattctattttaaataatattcaacaggctgaagatgcggttcaagagacgtttattactctttataagaacttggaaaagctccatagcttggctactcaagagcttaaacgctacattttgagggtcgcgaaaaacaaggcgattgatagttaccggaaaaacaaacgacatgaaacatttttagaagaatatgaaagagaatctgtagaagcagtagatgaaaatattgaagagtgggaaaaacgtaaaatgtctgaggttcaaattgatgcattgctaaaagagttaaacgaatctaatagacaggtgtttaagtacaaagtcttctataacttaacgtatcaagaaatttcaagtgtcatggggataaccgaggcaaatgtccgcaagcagtttgaacgcgctcgaaaacgagtccaaaatatgataggaggtatacaacatgacgaattcaaagaactccaaagaaatatatgaacttgctgaaaaaattgctttagatgattttgataaacttgaagaacaacatgaattttcacatacatatacgcgcaaaaagaaattgtttatggaggaaatgaagccgcaaaatggacaaccgctgaaaaagcgtaaaagacatcgtatgttaatcgctgctgcttgcttattgatcggcatgccgacaaccgtttttggagcagtaaaggtctataatatgattgttcaaaaacaaaattatgaagtaaatatttcagtaacaaataaggactcgaaaaaggctgataagtggtataagctgaaaatcgataaattaccagaaaatatggaagcaattgatgactctgctatgaaatattcctttaaagataactacgcaatgggtggattttcattcgttctttggagagtaggagggaattcagattttccaactctgtactcgaaaaattatgaagaaaaagagataaatggtaagaaggcagtaattgtccatagagaaaatggtaataaagatttaatgtttaatagagtaatttttctctattttgaggaagaaggaattatgttacaaagttatattggaaatgatataaacgaagaacaaatgatagatgtgctagggagcatttcacttgagcccacgtcaaaagaaaagtcatcatatataagcgattatgataaaaagtattttagccaagaaagtaaaacaactaaggtaattcctttgaagaaggatagcaaacgactatttcatataggacaaaaggttccagtaacgatatctatggataacagccaaattgaatatgtgatagaaaaagttgaagtttttgattcaatcaaagattttaaacaagagaactttaatgaacttggcctagagatattaagcaagaataaggctttagatcagacgggaaaattactatcatacagacgagatgaatataaattagggaatggtaaagattcaattgatacattagtagattcgaaattagttaatgttaaatttgtctacttaacaacaacagtgaaaaatattggcaaaaagtcgacagaagaaatctatatgcatccatccataaaacagcttaaatttgaagggaatgcatggaaatacgctaaagaagaggggatggacgcaacgcgtattatgacaggtgaagttgattatttagaacctcacggagatggaaaaagtttttacaatattggcagtatcacaccaggagaaacggtaaaagttaatttaggttattttgtagatgaagataaattagattcaatctttttggatgctttcaattacagagggattggtgacactgaaaatatgaattcgaaaaatcgttggtggtttgatattcgtcaataataaaacaataggaacaacaggacaaagaagctgcttatatttagcagcttttttcgtcttcatacatatgtaaaacttctttcgcacgcatacgtaaaccatctatcaattctgtcggttctaaaacttttgcatcttttccgagtctataaaataaaggggtaataaaattgatttctcctttatcaattgttgaatgtatatatcctgtcccgttttcgtttgttacaacgaattcttcaaggtaaggcacgcttttacattggcgtacgccttctggtgtcagtaaaacatgtaactgagtagggatgtgtactacgttagagttagaggaaaaccactcttctaaattcatgaatgtatcctcattttctttcgttgataatatagaaagaatacgatcgatgcgatacagtaatacttttttcctgtcatagtcataggacggtaagtaccatagcccgtcatgagcatatacaccgataggatgaacatgttttgtttttatccccgttttagattcgtattgaaagtgtaaatttttattttcaatagccgctgttaacacttcgtttaaaagtggtgtatcaattgttctctttggattccaaaaggcgatataagaacgtattttgtcaactttcgctttcgcatcatgttgtagggagctatatagtttatgtgtaacggaatttatttctgtgttaaaaggtaagtctctgtagtagcttaaagattgaaaggcaaaaaagatggagactgcttcttcttcggtaaataaaataggtggaattactctattcgttaatactttatatcctccgttgcgaccttgttcagcgtaaatgggtaatcccatatcacttaaatctaaaatgtatctatggacagtacgaacagaaatattaaattcatcagctatttcttgcgctgtaaatgcttttttcgcagaagcaaatataagaatatctaataagcgtttagcttttgacaaatgtatcaccttttttctttttaaacatgacataaattgtcgtgttttattgttagtatattgtttacagcataatgttatcaagatgagatgtaaggaggaaaaaatatgtcacgtgaaatagttttatttattgcggcgagcttagatggatatattgcgaaagaagatgatgatttacagtggttaatggaaaccgaaggggagggagataacggttatacagaaatgtacgaaacgattgatacaataattatgggaaaaagaacgtacaattatgtagtagagcatacagaaacattcccgtacttagataaaaaatgttatgttttttctaattcggaaaaaggttcaaacggaaacgtggagtttgtaaatgaagatgtagtagagtttacaaaaaggttaaaatcgcaagaaggatctaaaatatggatggtcggtggagggaatctactgagagaattctttaagaataatctaattgatgaatatgttgtcacgattacccctcacatattaggttctggagttccgttatttcaagataagaatccggaaattaatttaactttaacggatacgaaacgttttgggcaatttgtaaatttatattataaagtaaaatgataaagaaacacgactactgatggtagtcgtgtttctttatagatggcaatgaaatgataaagcaagacccgtaatcgacttcgctcgttacagtaatatttccgtcgtgtagttctacaatttcttttacgatagatagccctaaaccagttccgcctgtagatcgtgttcttgctttatctacacggtaaaagcggtcaaaaatgtgagggaggtcttcaggtggaataccttcgccttcatcttcaattgtaatggagatacgtttatgttcttctgtgatagaaatgtttatatgagaatgttcttttgaatgtctataagcgttatttaaaatgtttactataacttgttcaaatcgctgttcatctaagtttactagcagtgtaggaggacaagagaaagaaactttaatgcatctttctttatacatggcatttactttttcggctatgcgagttaggaatgtgtgtaaatgtacttcctttacttgaatagaaaagttatgttgttccatttgtgcaagtgaaaataaatcttgaactaagtttgtaatgtaatcagactcatcttttataattgataaatatcgcatacgttgttcagaaggggtgctttcttttgaagcaatgtcagcataacctcttacgtatgttaacggtgttcgtaattcgtgagcaacacttgctagaaattcacttcgctctgttttcatataatgtaaatcatttgcgagcgtttgaatagatgatgctagttcaccaatttcatcatttcgagtagtcgttaatgaaacggacaaatcgcctttactcattttttcagttgcatgtttcatgtgtaacaatggttttgttaataaacgtgataataggaaaattgtgatgactgtgagtagaaacgtgatggcgccagcaataatgaattgtttcgttaatccatttaccaacttttcaatggattctgttccaagaaacatatacacatacccttcatgttttccagctactatgataggactaactgtacatatataattagatgttttccagtgattttctataatcgctccgttatggtctgttcgagtctgcatgctactaatgtgattttttatagtcgtgtttatttcgttagatttagctagcacttctttatttgtatttgtaataacgacagttgtttcagcttcagattccattaatgctacgtgagagattgtttgcttatcataatatttttcaagtacatcacgatgactgtttccacgttttaataaagctgtcatttcttcatttactctagtgtttacgagactataatagagcaatacaaatagaacactttcaattaaaagtgtaacaattaaaaaataaaatccgaattgaattgaaattcgtttcatcgttttaccccttactgttcagtatcaatccatcgataacctactccatacacggtttttaaatgatgatcaatagggaaatttgcttttcgcaatttatcacgtaaattacgaatatgcgaatcgactgttcgatcttctgtatttgtatttaatccccaaattcgttcaatgagctgatcgcggcttaatacgtagttcacatgacgtaaaaataatccgagtaaagaaaattcaattggtgtgagaaggagctcttcattatggacagaaacgaagtgttttgtttcatcccatacaataccgtgatattggatttgtttatgttcatttgtacgtcttaaaacggcttcaattcttgcgaaaagttcttcttcatggaaaggtttcgttacgtaatcatcggctccaagttttaatccttgaacgacatctactgtttgatcacgagctgtaaccataataataggaatgttactaaaagatcggatttttttgcacgtttcccatccgtccatctttggcatcataatatcgagtaaaacaaatttaaagtttcgattttctatatgtaaaatagcttcttctcctgaagtcgcacatacgcagttatatccaattggtgtaagataaagcgttaataattcaagcattctcggttcatcgtctacgagcagtatatcaatcatagagagccctccatatttataatcgttacttaaagtgtaatgcaaaatcatgaagaaatggtgcagattatgatgcgtctgcataatttcttcagaattgcttgttattgtggagttgaaattacattttaggtaatcatattggctcaaaaatgattaatacggaggcggtatagtgaaaaaaatgacccgaatttttgggataacaataattacagcagttggtcttactgcatgcggacaaacgaatacagaccataaaaaccatgaatctacaaaagagaagaaaacagagcaaaaggaaatgaaaatgaatcaggaggtaacggcgccaaaagaaatgaacgaaggtgcatctaatgatttattaacgacaagtttaaaaaatgtaacgagattaaacacaaatgaccctttgcaaatggcagtattaacttcgcaaacgatatggccagcaactcataaggagaaccagccaggtgctgttattttagtaccagcaagcgagtggcaattaggtattgcgagtgcagatcttattcatcatccgaataacgggccgattttatttatagaaaaagaaaagataccggaaatgacgttaaaagaaataaaacgattaaatccaatcggaacgaaagatggaacacaaattatggtgatgggagatgtaggtactagcgcgcttgaacaattaaaaggttataaagtaaaacaaataaaagaaacggacccagctatatttgcgaaggatgttgataaggagtatgccgatataacaggaagctatccaaatagtgttattatcggttcgtctgcagaagaaggacgtttatatacaacccccgctgtaaattggatttctcatatgccggaaccactactctatacagaaaagaataaagtgccagaagcgacaatagaggcattaaaaatgagaaaagataaagcaaatatatatgtattagggccagaaaaaattgtttcaaaagaagtagaaaaagagctaagcaaatacgggaaagtaacgcgtattagtggagagacccctacagaaaactcgattgcgttcgctaaatttaaagatgaaaaaacaaaatttggctggggattcacaaaacctggtcacggtttatcatttgtttcaagtaaaacaccagatttagcagttgctggggcacctttttcacatatgggtaaacatgcacctgttgtattattagaagaaggtaaagcttcacaaccagtgtatgacttccttgcaagcattcagccgaagtttaaagatgatccaacacttgaaccatataatcacggtttcttattaggaagtacgagtgatatttcatttgaaacacaaggaatactagatgagaggttagaaattgtttaggaaagtggtcaaggacacggtggacattaataaaatgagcaaagacgctactgatatagcgtctttttctttaggaaacttttacatagtaaaaaatcttctactcgttatataatagccttcgtgcagtcggctagattttcttatggagaaaatcaaatgataaaggagtagaggagtggtattttgtttcaaacgataaaaaatgattggttttctaatgtgagaggggacgtgttatcaggaattgtcgttgctttagcattaatccctgaagcgatagccttctctgttattgcaggcgtggatccaacagttggactatacgcagccttttgtattgcagttaccatttcatttgttggcggaagaactgggatgatttcagctgcaacaggtgcaatggcattattaatggtaacgcttgttaaagatcatggtttcaatcggaacgtttgattggaactctgtaacaacaattcataaagtaccaaaaggaaaggcatttgttatgatcgtaacagttgtgattgtcctaattacacataatttagcattaggtgtaattatcggaacagtaattagtgcggtgttatttgcattcaatatggcaaagattcacgtgaaacatttatatattgaaaataagaaaatatacgaaattcacggtcaacttttctttgtagctacagccgatttcataaataatttttcatttaaagaagatgtaaaaggaattgaaatgaattttactcatgcgcacgtatgggatgattcagcagtggcatcaattgataaagttatcatgaagtatgaacaaagtggtgtgaaagtaactataacaggattaaatgaacgtagttcaaaacttgttgcaaatttagcgacttataataaaagaattgctagttaaaagcctcctttttagggggccttattatataatacgagtaggataacgaaaaggggattcagcatatgtacaaacaaattatattagcatgtgacggttctgaacatgcacttcgagcagcagagcatgcaacatatattgcgaaatgtagcgaagaaacaaatgttgaagttgtgtacgtagtagataatagaacggcaaaatcagatattatacaaggtcaaacagatttagaaacaatatcggctagtcgaaaagataaattaaaagagattgaaggtttattaaagaaagagaacatttcttatacaattacgatattacatggtgatcctggagatacaattgttcaatatgtaaatacaggagatatagatcttgtcattgctggaagtagagggctcaatacactgcaagaaatggtgcttgggagtgtaagtcataaaatagcaaaacgagtgaaatgtccggtgatgattataaaatgaaatagaatgtaacgaagaccttagtataactgaggtctttttttatgtataaatgactcttatttgtggaaatactagatatataagttgaaaagatgttaacttacaaatttgtaagttagttgttagagaaatcgatgttatgagatttttcccattggtaaaataaaagtatcaaaggggagatagggaggatggaagtaatgaaatcatttcaaaatttgtcatatagtcaaggggtaagcttaatttgtctagggggatttgctacatctgttacgttagctgttttaataaaggtgtttcatcaaatcttttaattttatagtagggaaggaattggttgttatcattagtaggaacagcaatgaaaataaaaaatagctcttagcatgtatgtaaatgctaagagctatttttatgcttgttatatgttatttaagcttgcttttgttttactgaccctgtatttaaagtaagagcaaggaagaacattgcaagtacgcaagatgcaagtaataagatgaatccgccatcccatccgaatgcatctacgataaagcccatagctgcactagcgaaagcagctccgcctaagtaaccgaagaatccagttaagcctgctgcagttccagcagctttctttggtgctaagtctagagcgtgtagaccaattaacataaccggtccgtaaattaaaaatccaattgcgacaagtgcgatactatcaaccattggattaccaggagggtttaaccagtaaacaagaactgcgataaatacaccgaccataaatagaataccagcaggtgcacgacgtcctttaaatagtttatcactcatccatccgcaaagaagtgtacctggaataccagcccattcatatagagcgtaagcagtacgtgagctactatgagtaaagcttttttcctctactaaataagtaggagcccagtctacaacgccgtaacgtacgaaatatacgaaaacgttcgcaatagcgatgtaccataaaaacttattgtttaatacgtatttaaataaaatttcctttactgaaagctcgcgttcgcggtcttttactttttcatctggtggatattctccagtatgttcttcaatagaaggtagtccacaagattgaggcgtatctttcatcgtaattaatacataaataccaactaaaattgaaagaatacctgggaagtaaaaaatacttttccagtcatctgcgaagaagtataagcctaatgttacaagtgaaggcataagcgctccgccaacattatgagcgacgttccaaatagacatttttgtaccacgttcgctaatagagaaccagtgaaccatcgtacgaccacaaggaggccatcccataccttgtacccatccatttaaaaactgaagtacaaacataagtataatgctcgttgtaatgaaagaaaatgagccgaaaataatattaatgatacctgataaaaatagcccagctgctaaaaagtagcgaggattacaacgatcggatacgatacccataagaaatttacttaatccgtaagcgatagaaactgctgaaaggataaccccaagttcccctttactaaagccttgctcgattaagtatggcattgctagtgaaaagttttttcgaacaaagtagtaacctgcataaccgatgaagatacctaagaatacttgtaaacgtaatttacggtattcgctatcaacgcgatcagctggtaagcgttccgcgtggggcgcaggtttaaataattgtgtgaaaaacataaaatgaaaatcctcccctaattaattcgaagcgttttaagacagagaacataaaaaggccatgaaatataaaaaagtttccttttttatgattcatagccgtgtactccgtttctccgtgactgtcaatattaacttcgtcgaaaattatacaactttgtgacaaaaatgtaaacgtttttatgaataaaagtattgacggattttgttcgtgggattaatatttaaatacattaaatattttattgtttaaataagaggtggataacatgccaaatgatatgacgcatatcgataaaattcaagctcttgccttttcgattggaaagaaaatgcagacggagttattagaacaaatgcaagcgacaggacttacaccaccgcagttttatattttaaagattttagatcattatggggcttcaagagcgacaacattagcaaaaaagatgtatgtgaagcctagcgcgattacagtgatgattgatcgtctaatcgatcaagaacttgtagaacgctatcacgacaaagatgaccgtcgcgttgtcatcatcgagttaacgaaaaaggggaaagctagagtagaagaggcaatgacagctcgtaacgagcatattgcaaaatacttttcacatttagagttgcaagaaagagaagatttattacgtctctttgagaagttagaaaccattatttgcgggacacaagagaaaaaagagaataactaagaggaattgaggagattacatggagcaacaagaaaatcaaaatagaaagttgttgttaatcggtttagtaatcgcgatgctatttgctgcattagatggaacaattgttggtacagcaatgccacgtatcgtcggtgacctaggcggattaagtttaatgacatggttaacgacagcttatatgttaacatcaacgacagttgtaccaattgcaggtaaattagcggatttacttggtcgtcgtaacgtatatataacagggctagttattttcatgattggttcggcgttatgtggtatggcgaatggtatgacagaattaattattttccgtggtattcaaggtcttggtggcggtattatgatgccaatggctatgattattattggagatatgttcacgggaaaagaacgtgcgaaatggcaaggtatttttggtgcgttatacggtcttgcttctgtaattggaccgcaagttggtggttggattgtagatgcagtgaattggagatgggtattctacattaacttaccggttggtattttagcaacaatctttattgcaatgggattaaaatcgcataaacaaacaggaccaattaaaattgatatcgctggaatctttacgatgattctcggtgttgtaagtttattacttgcgctaacgtttggcggaaaagattatgcatgggattcttggcaaattatcggtttatttgcactagctgtaattggtatcgttagctttgttatcgttgaaacgaaagctgaagagccaattttaccaatgcatttctttaaaaatcgcacatttacaatactgaatgcgattggattctttatgagtattggaatgttcggcgcgattatgttcgtaccattcttcatgcaaggtattgtaggagtaagtgctgctgaatcaggaacaattatgactccaatgatgattacaatgattgtgatgagtattatcggtgggcaacttgtattaaaagttggtgtaaaaccacaaattatcgcaggtatgcttattatggccggtggtttctggttattaacaacgatggatatgcacacaacgaagcttacagctacttcttatatgatggttatcggtttaggaatgggtcttgtaatgccgacattaacattagcgttacaagaaagcttcccgaaaaaagaccttggtgttgtaacatcatcaagtcagttcttccgacaaatcggtggtacatttggtattacaattttaggatcaattatgaataacacttcaggtacgacattaacaaagaatttagtacctgtattagatacattcccgaaagaagcgggacaaatggtaacgaaatttaaagatatgattcacacagatccacaaggtttatattcgatgctatttagcccagaggcattaaaacaaatgccagaagcgttcgctaacagtattgtacctattttgaaaaactctttagtagactcgcttcatactgtattcttaacaggattagtatttatcgtagtaggtgccatctttacgattttcttacaaaaaattaaattatcagatcgtaaaaaagatgctaaagagcctgttgtagaagaaaaagaaaaaactgtatcatactcgtaatgaagaagcatcgccttatggcggtgcttttttgagtataaccttaaaagctttttagtgagaaatgattgacgtatttttagaaatacgttatattattttctgtaaacggttacatgaaatgaggagaaaagagaatgagtacgatcaaagacgttgcgaaattagcgggagtatctgttgcgaccgtttccagagttctaaataaaaatggatatgttcacgaagatacattaaaaaaggtagaacgtgcaattgagatgttagattataagcctagtacagtagcgcgttcactgtataataaaaagtctcgtttaattggcttagttgttccaaatatcgtgaatccattctttccggaagttgcacgtgccgtagaagatgtagcacataaacaaggttacacagttgtcctttgtaactctgatgaaagtttagaaaaagagaaacaatatattgatgtgcttagacaaaataatgtagatggatttattgtagcaacgaatccacaaaatagtgttaattacatgaatgtatctgttccagttgttgcgattgaccgtatgtttaatgagcgtattcctactgtatatgcagataactatgcaggaagtcaggctgcgacaaagttgttactagataaaggatgtaaacatattgcacatattcgcggtccacgtgatgtgagtactgcaaatgaacgctttgaaggttttgtagacgttattacgcaaaataatctttcgtatatgattgcagagagtacgtttgatccagcaaatagtgagcttgtagcgatggaattattagaagaatacccgcatattgatggtattgttgctgggaatgatttaattgcgatcggtattgtaaaggctgcacttcaaaaggggattgtcattccaaatgatttacaaattatcggatttgatggcatttctttaacggaaatgatgtatccatctattacaacagttgcacaaccgatatatgaaatggggaaaattgcaacagagttgttgttagagcaaatggaaggaaatacattagaagagaaacattatcgtttgccgattgaaattatagaacgaaatacaacgaagtaaggagatgaaacagatgccaaatattgcagtagtagggagcatttcaatggacttagtggctgtttcaaaaaaacggccgaaagcaggagaaacagtaattggtgaagcgtttcatacaattccaggagggaaaggagcaaaccaagcagttgctgcagctagattaggagcaaatgtagcaatggttggagcggtaggaaatgatgattatggaacagtagttagaaaaaatctagagaacgaacgcatttttatcgattatgtggtaccggttacagatagaacgacaggaattgctcatatcgttttagcagaagaagataacagtattgttgtcgtacaaggggcaaatgctcttgtaaataagtcagttgtagatcgctccaaagaacttcttgtaaaagcggatatggttgttcttcaactagaaattccacttgaaacagtaaaatatgtattggctatttgtgaggaacataatattcctgttatgttaaatccagcgccagcacaagttttatcagaagacattttagaaaaggcaacttatattacgccaaatgaacatgagtgccgcatcgtattagatgatttcatctcaccaattgaagatttattggcgaagtatccaaataaattattgatgacagaaggttctaacggtgttcgtttccataatggcacggagattgtacatgttcctagcattgctgttgatgtagtggatacaactggagctggtgatacatttaatggtgcgttagcagttgcactttctgaaggagagacacttcaaaaagcaattcgtttcgcgaatattgccggtggtctttctgtaacgaaacttggggcgcaaggcggcatgccaacgagagataaagtacgtgaagtgcaggtgattgttggatgaagaaacacggcgtattaaacagtgagattgcatcaatccttgctttacttgggcatacggatacgattgtaattgctgattgcggtttaccaattcctgacggagtaaaaagaattgatttagctgttgaaattggaaaacctagctttttagatgtattgcaagtggtagctgatgatatggcaatcgaaaaagtgacgttagcagaagaagtcattataaataatgcggaagtaaataaagaaatagagcagaaattaatagagccagcatttgagtatgtatctcatgagcaatttaaagagcatacaaagaaagcgaaggcgattattcgtacaggcgaggctacgccttatgcaaatgtaattttacatgcaggcgtgattttttaataaagggaagtgatgggaatgcatattgaaatgaaaaacatttcaaaggcgttcaatggaaatcctgttttgaagaatgcacagtttatgattgaaacaggagaagtccatgcattgatgggggaaaatggagcgggtaaatcaacgctcatgaagattttaacaggtgtatacaaaaaagatggtgggacaatcacgatcgatgggcaagagcgcacctttaaaaatgcgaaagaagctgaagagtacggcatcgcatttatacatcaagaactaaacatattgccgaatttaacagtagctgaaaatatgtttctcggcaaagagttaatgtatgggaaaacaggtattttacgcactcgacaaatgaacgcgattgcgcagcagcaactagcggagttagggttgcatgtaagaggcgctatgttagcagaggaattatcggttggacaacagcaaattatcgaaattgcgaaagcattaatgacaaacgcgagcgttattattatggatgaacctactgcggcactgacggatcgtgaaatcgaaacgctctttacagtaatcaataagttacgtaaagaaggtgtttcattcgtgtacatttcgcatcgtatggaagagattttctcaatatgtgatgctattacgattttgcgtgatggagaattcgtcggaaagagattaattccagaaacatcatttgatgaagtagtgagtatgatggtggggcgcagcattggtgaacgttacccagagcgaaatagtcaaattggtgatgtcatttttgaaatgcgtaacggaacgaagaaagggaaatttgaaaatgtttcgtttcaagtgaggaaaggtgaaatccttggtgtagctggtttgatgggggctggtcgcactgatattatgaaagcgatatttggttatgaacctttagactctggacaaatttttataaatggacaagaagtaaagattgatagtccaatagatgcaattagacaaagaattgctttcattacagaagatagaaagtctgaaggattagtgttagatttttcaattcgagaaaatttagctttaccaaatttagaaagtctttcaaagggaagtgttctaagcaacgagctagaacaacagtttacggcggatatgatgaaacttcttaatgtgaaagcatctagcggagagcaggcagtgaaatctctttctggtggaaatcagcaaaaggttgtaatcgcaaaatggctaggcattcatccgcagttactcattttagatgaaccaacaaggggtgttgatgttggagcgaaaaaagaaatttactctattatgaataagcttacggagcaaggagatgccgttattatggtatcatctgagcttccagaagttttagggatgagtgatcgtgttcttgttattcatgaaggaaaagtaggcggaattttagggaaagatgaggcatcacaagagtctattatggcactagctacagggggagagtaaggatgactaagaaggggaatgtattacaacaactcggttctttaatcggtttagtattaattatcgtcgtaattacagctttaaatccagcgtttattgaaattccaaatttatttaatatactgcgtcaagtatcgattaatgcgcttattgcattcggaatgaccttcgtaattttaacagggggtattgacttatcggtaggttctattttagcattatcaagtgcacttgttgctggaatgatggcaagtggcatggatccgttccttgcaatggcagttggattattagcaggtcttgtaatgggaattgtaaacggtatcatcattgcgaaaggaaaagtagctccatttattgcaactttggcaacaatgactatttttcgtgggttgacgcttgtttatatggacggacgtccgatcactggtcttggtgatcatttaatgttccaaatgtttggccgcggttattttcttggtattccggtaccagctgttacaatgatgatcgctttcgcagtactgtacttcattttgaagaaaacgacatttggtcgccgtacatttgcaattggtggaaatgaagaagcagcagcactatcaggtattaatgttacgagaattaaagtaatgatttacggtctttccggaattttggcagcgcttgcaggtattgtcttaacatcacgattagattctgcacagccgactgcaggtacttcttatgaattagatgcaattgcagcagttgtattaggtggaacaagtctttctgggggaagaggatggattgttggtacattcatcggtgtacttattatcggtgtattaaataacggtttaaatttattaggtgtatcttctttcttccaacaagttgtaaaaggacttgtaatcttactagctgtattaattgatcgcagaaaagaagcgtaatggagggacagttcatgaagaaatggttacttatactcgttgcatgtattatggtcattactgctggttgttcaatggaaccgccagaatgggcaaaggattctagcgataaaggtcgaaataaaactattaaagttggattctctgtttcaactttaaataatcccttttttgtaactttgaaaaagggtgcagaaaagaaagcgaaagatagtggcatcgaattaattgctgttgatgcacaaaatgatgcagcaaagcaaacgaacgatgttgaagatttaattcaaaagggtgtcgatgtagttgttattaatccgaccgattcagatgctgttgcttcagcagtaagtgcggcaaatgcagcaaatgttcctgttattacagtagaccgcgttgcgaattcaggtaaggttgtttctcacattgcttctaacaatatcgaaggtggtcaaatggctagtgattacattcgtgaattagttggcgaaggagcaaacgttgctgagttagaaggaatccctggatcttccgctgctcgtgaacgtgggaaaggattccataacgtagccgataagtctttaaaagtagttgcaaaacaagcagctgattttgatagagcgaaaggattatctgttatggaaaacattttgcaagcaaatggtgatattaaagccgtgtttgcgcataacgatgagatggcattaggtgcacttgaagcattgaagtctgctggaaaaacagatgtagtcgttgttggatttgatgcaacagacgatgcagtgaaagcggttaacgatgggcgtatggctgcaacagttgctcaaaaaccggaattaatcggggagaaggcgatgcaaacagcaaaagagataacacaaggtaaaaaagtggacaaatctattccgattgaattagagcttattaagaaaaataaataaatataaaatgaaaattaggaaggaagaacaacaaatgaaattctttattgatacagcaaacgttaacgaaattaaagaggcaaatgaattaggtgtattagctggagtaacgacaaatccatcacttgtagcaaaagaaggcgtagacttccacgaacgcattcgtgaaatttgcaacgttgtagaaggacctgtaagtgcagaagtaattagcttagaagctgataagatgattgaagaaggaaaagaactagcgaagattgctccaaacgttgtagtaaaagttccaatgacaacagaaggtttaaaagcagtaaaagcgttctctgatttaggaattcgtacaaacgttacattagtgttctcagcagttcaagcattacttgcagctcgtgctggtgcaacatacgtttcaccattcttaggtcgcttagacgatatcggtcataacggtatggacttaattcgtcaaatcgcagaaatctttgcaattcatggcatcgaaacagaaatcattgcagcatctgtacgtcacagtgttcacgtaactgacgcagcattaaacggtgcacatattgcaacaatcccagcaaacgtaattgcttcattagtgaagcacccattaacagatcaaggaattgagaaattcttagctgattgggaaaaaacacaagagaaataatagaaaagcaagaatcctagtttaattgactaggattctttttttatttaaaagaattttcatgcaattttgcatattgtcttttaaatttgttatataagatatttaatatatatcacataactctttatttttcatatttcgacataaagtgaaactttaatcagtgggggctttgttcatccccccactgattattaattgaaccaagggataaaaagatagagggtctgaccagaaaactggagggcatgattctataacaaaaagcttaatgtttatagaattatgtctttttatatagggagggtagtaaacagagatttcgacaaaaacgcactaatttatctgaattttaagttttataaaaggggagaaatggaatgagaagaaaagcaccatttaaagtgttgtcatcattagcaattgcggcaattatcggatgtacatctgtaatgagtgctccgttagcatatgcagaaacggcagcaaaaaagaaagataatgtatctacaacaccaattgattacaatttaattcaagaagatcgtttagcggaagcacttaaagaaagaggaacaattaatccatcatcttctaaagaagagacgaaaaaagctgttgagcaatatattgaaaagaaacaaggagatcaggcgaataaagaaattcttccagatgctcactcacaagaaacgtctgatttcacaaaaaaagtaaaagagaaaaagatggaagaaaaggaaaatgtaaaaaaggctgaaaaaaatgttagccttgagcaaaagccagaaccaaataaaaatcaattgaatgggcaagttccaacttcaaaagcaaagcaagctccatataagggatctgttcgatcagataaagtattagtgctactcgttgaatttagtgattataaacataataatattgatcaaacaccaggttatatgtattcgaaagactttagtagagaacattatcaaaagatgttgttcggtaatgagccgtatactttatttgatggttcaaaagtaaaaacgtttaaacaatactatgaagagcagtctggtggtagttatacgacagatggatatgtaacggagtggctaactgttccaggaaaagcatctgattatggagctgatggtagcagtgggcacgataataaaggtccgaaaggtgcacgtgatttagtgaaagaagctttgcatgcagctgctgagaaaggactagatttatctcagtttgatcaatttgatagatatgatacaaacggggacgggaatcaaaatgaacctgacggtgtaattgatcatttaatggtaatccatgctggtgttggtcaagaagctggtggcggtaaattaggtgatgatgcgatctggtcacatcgttcaaaattagcagtagatccagtagcgattgaaggtacgaaatcaaaggtagattactttggtggtaaagtagcagcacatgattacacaattgaaccagaagatggagctgtaggtgtgtttgcacatgaatttggacatgatcttggattaccagatgaatatgacacgaaatatactggaaatggttcaccagtcgaagcttggtcattaatgagtggaggtagttggacagggaaaatcgcaggaacagagccgactagtttttcaccacaaaataaagacttcttacaaaagaatatgggtggcaactgggcaaaaatattagaagtagattacgataaaattaagagtggtgtgggagttcctacctatattgatcaaagtgttacgaaatcaaatcgtccaggcgttgtacgtgttaacttaccaggtaaaagtgttgaaacgattaaaccggagtttggaaagcatgcatattatagtacaagaggcgatgatatgcatacaacgttagagacaccattctttgatttaacaaagggaacaaatgcaaaattcgattataaagcaaattatgagttagaagcagagtgcgatttcgtcgaagtacatgcagtaacagaagatggaacgaagacgttaattgatagacttggagaaaaagtagtccaaggagataaagatacaacagatgggaaatggattgataaatcatatgatttaagtcaatttaaaggcaaaaaagtgaaactacaattcgactatattacagatccggctgtaacatataaaggttttgcgatggataatgtaaatgtaactgttgatggacaagttgtattttctgatgatgcagaaggacagtctaaaatgaatttaaatggttttgttgtttctgatgggacagagaagaaagctcattactactacttagaatggagaaactatgcgggatcagataatggattaaaagcaggaaaaggtccagtgtataatacaggtcttgtcgtttggtatgcagatgatagttttaaagataactgggttgggatgcatccaggtgaaggattccttggtgttgttgactctcatccagaagcgctagttggtaatttaaacgggaaaccagcatacggtaatacgggcatgcaaattgcagatgctgcattttcatttgataaaacaccagcatggagtgtaaattcattaacacgtggtcagtttaactattctggattacaaggtgttacaacttttgatgattcaaaagtatatagtaacaagcaaattgcagacgcaggaagaaaagttccaaaccttggacttaaattccaagttgttggacaggcagaagataaatcggcaggtgctgtttggattaaacgttaataacataaaagcacattcttcatatgaagagtgtgctttttaatttgtacagtaagttattattttagtttatgtaatacaagtttttattcatgtgtagtgtatcaaattatgtggggaaaggaaatatttccgaggaaattgtcgaagtatcgtcagtatttataaactttctgtttaaaagaagagatgtattattgcctttacggctcaatttatttacattgttatttggttatacacaaaagtaatatattcggcagtaaaagagcgctattggatagtgttctttttgtagatagaaaggagttgagttaaatgaaagaaataattgaatgtccacagtgtgaaggagagattactgcgcaacatattattgatctcccgcatcctttttcattcagatgtccacactgcaaggtgaggttaaaagaaatgagaatcacaccgtgcttaatattagcagcaatttgtatcattccactgtttattataattggagagagtattaaggaattactagtaaaatatttttctattatagatgatgtaccaactgtacttattttcttcttattttgttatccattgtattatttctatgaaaaatataatgctatattgtttattaaatacggcttattgaaagttaaaagttgaattgaataggagattatcataatgctttggaaaatatatttagttattgtagcaatgttagctattatttcgttagtaaggggcatgtttcaaacaccaattcaaaagtttgactttgtagtttctattattacgtggatagggctctttggttttgtatttgatatacaaatattaacctcaattgtttggaaatgtatcttcttgtttagcgtcatttggactttaactgcagtttttgtttttcgtttatatgaagagcgagatgagccgttaccttttatatttaaagtaattggaattattccaacgcttccattatattacggattatatcaatatgcatttaaaaaaagacaacgatggattatcccatcattgtcttttttactttgcttcttacataaatcatcccagcaaatgttaataaaaatgctgtcccgataatgaagctgatgctaggtgatgctccgattgcgccgactgtaaaggagccagcaacaactcctaatgagaagaaggcataaaataatccgaatgcctttccgcgattatcgtctgtagtattttcaacgagtaaagcgttaatagacgggaagaggattgcgaatccaattccataaatcatcattacgataaagagcataccttttgtagcaaataatccgagtaaagataatgcgaatgccataactgcaattccgattagcattagtttcgaacgattaaatcgatcgtaaatacgatttgttggaagcaagaagaagaggatagcagttataccaaatacacttaacatcatgcctgttgtggatgctttaagcgctaatgcctcaacttttactggtaacatataagtgacaattccttgtgaaaacattaatgtgaaagcaccaatatatgcttgtaataacggttctgattttaaaagttcaaccatatcttctttgttcatcatttgcgttcttgatgtatcttttcttgatacgttatttggtaagaagaatagagatacgatcgtaccaagagccattaaaatagaaatagtaatgaagacccattctacgccagctgttgctttcataataccgctgaaagccggtcctacgattgcggctgttccaacagcagcaccagatagagccattgcttttccttgtttttttgcagttgtttgttttgataaaaatgtaaaggcagcaggaattaaaaagccatcactaaatccatgcataaagcgaacaactaatagttgttcaccactttgaacaacggtgtataacaagactatgaaactcgtaattcccatgcttatataaaggattttttttgcaccaaatttatcgacagctgctccagcaataatattaccgatcatattagcgaatgagtacataccgacaactagcccgataataagaggggttcctccaaggctttgagcgaaagtactcataataggtaattgtgaaaatgtatctaaaaatgccacgataacgataaagtaaataaaatatttcaagcgatattcacctctcctatgctattatggcataatgctaatttcacctgcaatgaaattgaattaacagatgtggaaaaaagtacaaagtgacaaaatattgaacgttatttgtaaaaaattagtagagatgcgattgtttttttgaaatatatggatagaagtattataatagaattgtaaacttcaccaggttaagtatatacatagagagggatgtataaaatgaaagcactactttggcataatcaacgtgatgtacgagtagaagaagtaccagaaccaacagtaaaaccaggaacagtgaaaatcaaagttaaatggtgtggtatttgtgggacagacttgcatgaatatttagcagggcctatttttattccaacagaagaacatccattaacacatgtgaaagcacctgttattttaggtcatgagtttagtggtgaggtaatagagattggtgaaggagttacatctcataaagtgggagaccgcgttgttgtagaaccaatttattcttgtggtaaatgtgaagcttgtaaacatggacattacaatgtttgtgaacaacttgttttccacggtcttggcggagaaggcggcggtttctctgaatatacagtagtaccagaagatatggttcatcacattccagatgaaatgacgtatgaacaaggtgcgcttgtagaaccagcagcagtagcagttcatgcagtacgtcaaagtaaattaaaagaaggggaagctgtagcagtatttggttgcggtccaattggacttcttgttatccaagcagctaaagcagcaggagcgactcctgttattgcagttgaactttctaaagaacgtcaagagttagcgaaattagcaggtgcggattatgtattaaatccagcaactcaagatgtgttagctgaaattcgtaacttaacaaatggtttaggtgtaaatgttagctttgaagtaacaggtgttgaagttgtactacgacaagcgattgaaagtacaagcttcgaaggacaaactgtaattgttagtgtatgggaaaaagacgcaacaattactccaaataacttagtattaaaagaaaaagaagttattggtattttaggataccgtcacatcttcccagctgttattaaattaattagctctggtcaaattcaagcagagaaattaattacgaaaaaaattacagtcgatcaagttgttgaagaaggatttgaagcacttgtaaaagataaaacacaagtgaaaattcttgtttcacctaaataagatagaatcgaatagagtagcccttttctagaaatagaagagggctactttttttctatactgaaaggtgatagactttcctttgactaaatgtatttttgtttggaagggagaatctaatgctttcatttttgttaactttaaagcgaatgttaagagcctgtttacgagcgtggaaagataaagaatttcaagtattattcgtattaacaattttgactttaatatcgggtacgattttttatagtacagttgaagaattacgtcctattgacgctttatattttagtgtggtcacgttgacgactgtcggtgatgggaattttagtccgcaaactgatttcggaaagatatttacaatcttatacatatttattgggattggattagtgtttggatttattcataagttagcagttaatgtacaattgccaagtatattatcgaatagaaaaaaagagtaaagctggtcatctccctgtcaagtagacagaaataaaaagagtattatgccacggccttttcccgatattctatcggggaaaggccttagtttgtctagcatctaaaataaaaattgacgtttcacgttgtttgtttcgttcagttttcaaagaactacttggtcgctcatttgcgacttccttatgttaacattttcgtttttcgatgtcaactaagtttttcaatttctttttgtcgttttctgcgtttccgcatcagcgacggttattaatttaacatatacaaactattaacgtcaacactttttaataaaaaattctttttcttacataacgaatacattcttctgtgttagctactctccggaataaacagaaaatgattttatatctttcttccatggctttttttacaacttcatgaatacgctcatcttcaaaatcaaataaaagttcctctaattctctcttcaatatgtattccatttcttttctctcttcttttgtcaacatcagcccaagcaaacaatcacctcaataattccttacgcaacaataaacgttccgctcattttcaattatcacaatcctatcatccattatatccactacttacgatattaatcctttgttctcttttttatatttacagcatatatgtaactgaaaaggattggacaaaggggcgtaatattatgtttttcttttttattacgagtaagagaaattttaaacacattagcttaatagtgatactgtccttatttacagcatggctactctttttaaaaacatattcacatgaatctgctttttcaactgctacaggccctaaagtaatttacaaaggagacaccgctaaaaagcaagttgcatttacgtttgatattagttggggagacaaaaaagcaattccaatcctagatactcttaaagaaagagaaattaagaatgcaacattcttcctttctgctgcatgggccgaaagacaccccgatattgtagagcgaatcatgaaagacggacacgaaatcggtagtatggggtacaattacacatcctacacttctctagagacaaatgaaataagacgagaccttttacgagcacaagatgtttttacgaaacttggtgtaaaacaagtcaagctgttacgtccacctagtggcgaatttaacaaagcaacccttaaaatcgcagaatcacttggatacaccgtcgtgcattggagtaataattcaaacgattggaaaaacccaggtgtaaataacatcgtttccactgtctctaataatttgaaaggtggagatatcgtcttattacacgcatccgattctgcccttcaaacaaatagagctttaccgctgctcctgcaaaaaataaaaagtgatggatatgagcaaatatccgtatcacaacttatttccaacacaagtacgaaaagtgaagatgtgaagtagcttcttccctaccactcttcacgcataaaaagctctactacctttcaagaaggtggtagagctttttgaatcataccatttccagcattataactgctggtgtataaaatctctctattaagctgatttacttgtttttccgattaaacgatgtaatacaagtaattgatatgcgttacataacaatagcggtataaccattaaatataaccaatctgtatcattaatccgaagcgctggtacccattcaaggatcgttacaacaaccataaagaacagagctggcacaaatgcttttttatttgtttctttgctttttacataagcaacaattgctccaaacacaaataatattccagcaacaagtatgttattccctaacgagacttccccatttgcaataagtacagatcttaaatacacaaaatcaaataatacgaatgcaataaagaagagctggactgcattccataaagaagatgagcggaacatccctagtccaaaacggtggattgttaaatatgcaaagaatcccatttgacttataacactaaaaataaatcctacacccatcagccagaaagatactgctaaaatctccttaccgtcgaaattttgaaaaaattcattgtacttgtcccactccaaaacaaaaccaataataactgtgctaattccaccaagaaacaacgtcgttaaaaatagtcgtacccacttgcggctattcacaacacatcccccattatccttatatttctaattaaattgtatcaatgacaatttcaaaaagctagccatgttcatgtataaattccttaaagatatttatattaaaaagagagaactgtgctgaaaggagttccaacttatgaaacggatgctattcattttcgtttcttcttttctacttatcgcacttgcagcatgcgcacaaggaaaagaaacgaaatccgaactagattacgatcaaacaaagaaaatgattgttgatattttaaaaacagatcaaggtaagaaagctattcaagatgtattaactgatgaaaaaatgaaacaagcactcatactagatgaaacagtagtaaagaaaacgattgaagatgccatggtatccgataaagggcaacaattctgggaaaagctctttaaagatcctgagttctcatcgaagttcgctaaaagtatggggaaagaacaaacccaattaatgaaaaccttattaaaagaccctgaataccaagcaggcgttatagaaattatgaaaaatcctgaagtagaaaaaatgatgttacaaacaatgaagagtaaagaataccgtcaatatctacaacaagtactaacagaaactgctgaaagtccactcttccaagccaagatgattgatatcattagtaaaggtgtgcaaaaagctgaaaaaggcggatctggtaagaaagaagcaggcggtgacggtggttctcaaggcgggaagaaggaagaatagtaaaaaataataactataataacgagtggacaatttatacattgttcactcgttattactttatcttgctattaacagacgaaatggcaccctctagttaagcgaaaggtttactagcaacaaaagccttattgttgtcagtaacaggtgaaccccactgattaaagtttcactttatttttgtgtaacagctgttctatcaattactgtttcagctattttactataaataatgcccgttgtatgtgtatcttcatatactgaaggagcaaagtcttctttattccaatcgggttgttgtagcggaatgcgaccaagaacattcgtttgtaattcggtagctaacttatctcccccgccttttccaaatacatattctttctcaccagttaccttactttcaaaatatgccatattctcaacaacaccaagaatactatgttcagtgcgcaatgccatcgctccagcacgcgctgctacaaacgcagctgttggatgaggcgtcgttacaataatctctttgcaagatggcaacattgagtgcacatctaacgcaacatcacctgtgcctggtggcaaatctagtactaaataatctaaatcgccccattctacttctgtgaagaagtggtttaacattttcccaagcataggtcctctccaaataactggtgcattatcctctacaaagaagcccattgagattacctttacacctaaacgttccaccggaattatcttgtcacctcttacgataggacgtttttctatccccatcatgtctggcacactaaaaccgtaaatgtccgcatcaataataccaactttttttcctaaacgagctaaagcaactgcaaggttaacggaaacagttgattttcccacgccaccttttccactcgctactgctaagaatgttgtttttgaattaggtgacaataaagattcactttgctcttcttcttgttccggtgcaaactgagctaattcctcttctgtaaattctgcaaaacgaagtccaactgttgctgccccaagttcttttactaactttacaattccagactgcaactgcatttgttccgctgtaccggtttttacgattgcaattttgacactcacatgttccttctctggcttgactgttacctctttaattgcacttgtttcttttaatgttttatgtaaaaacggatctacaatcccttctaacgcttcaaccacttgctctttcgttatcataattagcccagccccctgtatgaaaaataacgtaatgttaattgaatttatctctgcttatccttgaaataaatgcgtttacatttccagtataacatattttccgaaaacttcgttaacgagagaagctcaaaaaaatcctccttattctggaggatttcctttttccgtgaaataacgtaatataccacggtatattgcagctgctaccttttgctgatatttctccgaatttaacatatacctttcgttcacattcgataaaaagccagcttcaattaaagcacctggtgttttagaatactttaataaatatacatgcgaaattgtcttagcagaacgattcgtgttttctaaacttgttctcaattcagcctgtataaattttgcagcacgttcattttcaatcgaagagcggtaatagaacgtttgtgcgcctttcgatccactactagttaaagcatttaaatgaatacttgcaaaaaagtctacatcaggtttattgatgatttctacacgtttttttaaatcctctgctttacgtctactatatgactttgtatctttgttagctaaatcataatctccctcacgcgttaaaataactagtgcaccttgttcttgtaaatagtcttgtaccttttttgtaatttcaagcgtaatatccttttctataatatcctttccaccaacagcccctccatctggtccaccatgcccagcatctaatacaattactttccctgataagggtaaattccaagctcgccacgattttgtaatttgaaattcttgtttaactaaaaaaaacaatacaaccgcagcgagtgcaaaagagataattcgaattctcttcatacctttcctcctccagctagtccctctaattacttatatgggacaagaggaaagtttatgcttgtcttaatgaagctttaatcgatatcttctttcacctttttcatacccttcttgccaccacaatcctataaactgctgacaagattcaaaaagtaattcctcatctttcaactttatttctcgcatagtcatactcgttaaaaattgaaatagcgtttcagttaattgttgttcttcttctaaagctctatatttcacatcaaaaaacgattcaccataataaccaaatttactgtatctcgctcctaataaataagattctatccctaattcaatacagtaatcttcatactgacgatgaagctcttgcatttgaaaggcatcacgaatatttgaacgcaatgtttttaatgataattcccgcaacatcttccgctcgtattttaactgcttttctttttgtttttcttgtaagctgacaatgacattcatagtacttataaacctccctaatacgtattagtctaaacttctaaagaagaagcatacgcgtggcggtagcactaaaatattccaagctataaaaattgcaaaagaggaatgaaacataaaaaaaccccaaccaaaatggttggggtttgtagttcgcaaaaattaacgttttgagaactgaggtgcacgacgtgcgcctttaagaccgtattttttacgctctttcatacgtgcgtcacgagttaatagacctgcacgttttagtgttagacggtattctggatcagcttttaataaagcgcgagaaataccgtgacgaatagcaccagcttgaccagtgtatccaccaccatttacgtttacaagtacatcgtagttacctaaagtttctgttgcaactagaggttgtttcactacttcacgtaatgcagcaaatgggatatagttttcaaaatcacgaccgttaatgataacgcgtccttcgcctggaactaggcgtacgcgcgctactgaactcttacgacgtccagtgccatagtattgaacctgtgccaaagtaagccctcctttaattaattatccgcgaagttcgtaaacttctggtttttgtgcttggtgtggatgctctgctccagcatacacgttaagtttcttagaaacttgacggcctaagcgtccttttggaagcatgcctttaattgcaagctctaacatttgtacagggtagtttgtacgcatttcaagagctgttctttgcttaagtccacctgggtggttagtgtgacggtagtaaattttatcgtttaatttattacctgttaaatgaattttctcagcgttaataataattacatgatcacccgtgtcaacgtgtggtgtaaatgtaggtttgtttttaccacgtaaaatggatgctacttcactagcaaggcgacctaaagtttgaccttcagcatcaaccacataccatttacgctcaacttcgttagcttttgccataaaagtcgtacgcatgtgtttccctcctcgttatcttttccatagaaaaaatctattgtttatcttaaacacgatttccttccggggctaatcgtggttttagaaacaataccatatgttatgatatacttttgagtttctaatgtcaagcaaatgttacaccaggattagttgttatagtttacctcccataagtaaagcccatgacctggagccatctttccagcaaactgacgattttgtttcgctaaaatctctggaatgctatcaggatcaagctttccttgccctacgctaagtaacgtaccaacaataattctgaccatattatataaaaatccattacctacaaaacgaaaaattatttcatcattttgttcaattaactcgatttcataaattgttcgcactttatcttttttgtcagtttttgccgaacaaaaagaagtgaaatcatgtgttccaataaaataaggaattgcttttcttatagagttgatttcgagcgggtatggatattgatatacgtaatttctacggaatacatccgcagtctttgataataatacacgataacgatattcttttttctcaacaccgtaacgtgcatgaaattcttctgtttttttctctacttgcctaataacaatatcatctggcaacattgtgtttaaagcattaatccattgccactcttcaagagacaaaggagtatcaaagtgtattacttgtccttttgcatgaactgtagaatctgttctaccagatgcctgaacacgaacaagttctcccttatgcaatttctgcaatgctttttctatctcctgttgaacagtacgatggttcggctgaatttgataaccacaaaaatgcatgccatcatatgcaaccgtacattttattctatccatttctctattctccattacgatcgcacccatgccaaaatacaagctaaacaaaataagctgacaatcgttactgtatcgctttttttccagcgtagttgcctaaatttagtacgtccttcaccactttgatatccacgagcttccatcgcaatggctaagtcctctgcacgcttaaaagcactgataaacagaggaacgagcagtgaaataatagctttcattctatcttttatcggtcccccggcaaaatcaataccacgtgacgcttgtgctttcattattttactcgtttcatccattaatgtcgggataaaacgaagagaaattgacatcattaatgcgatttcatgaacaggaacctttatacgcttcaacggctttaataacgtctccaaaccatctgtaatttcaataggtgtcgtcgttaacgttaataatgtcgtcattaaaataataacgaagaatcgtacagaaatgtatatcccttgctctaatcctttttcatatatcgaaaaccaaccaagctggaatagtacatccccctccttatttgtaaaaatatgcaggaaaaatgtaaaaagaaaaatccataaaattggttttaagcccgaaagtacataacgaatcggcacttttgcaaaaaataaagcaatgagtgcatataaaaataaaaatccatatgaaatcgcattatttgctaagaaaacaacaaatacatataaaaagacaatcagcagcttcgtacgtggatcaagttgatgaataagtgaattccccgggatatatctcccaataatcaactgctgcatgattcatgaccaccttttcgtaacacctgcacaacttcatgagtaagatcctctaaagataaggtagcctttggaattgaaataccaaacttctcttcaattgcacgtttatactttaatgacataggaagatccacaccaattttctctagttcatcggcatgtgaaaatacttcctctgcacttccttgcaaaaagaccgttcctttatgcataactacaatctgctccgcatactgagcagcatcctccatattatgcgttacaaggataactgtaagccccttttccttgtgcagcttataaaacatctccataagttcgttctgcccttttggatctagtcctgctgtaggttcatctaatacaagcacttcaggttccatcgccagtacacccgctatagcaacacgtctcatttgtccaccacttaattcgaacggagaacgtgttaacagttccggttctagccctacaagttcaattgcctttctagccttttgccttgcttcgtctacagatactccaaaattagtagggccgaaacaaatatctttctccacagtctcttcaaacaactgatgttctgggaattgaaagacaacccctacttttttacgtagtggctttaactttttttctttctttcctgccgaaatcaaatgttcaccaatttgaactgtaccatttgtcggctgcaataaaccatttaaatgttgaatcatcgttgacttacctgaaccagtatgaccaataatggcataatagcccccacttggaaacgacacatctacatcataaagtgcgcgtctttcaaatggagttttatattgataacgatgctctactttttggaatgtaatctccaaagttcgttcaccaagctttccattgtaagatgcgtattttgcaagagaatttcatttctttttaataattctgctattttcactgaaaacggtacatctaagccaatttcttggagcatatgagaggatttgaaaattttttctggagtcccttcctctaatatttctcccttatttaaaataatgacacgatctgactgtgccgcttcttctaaatcgtgcgtaatcgataacacggtaatacctttttgagtaacaagttgtctaaccgtttctactacttcacgtctcccttgagggtctagcattgacgttgcttcatctaatattaaaatagatggttgaagtgctaaaacgcctgctattgccactcgctgcttttgcccaccagataaggaatgaggctcatcattaagaaaatcttccatacggacaagtcgcaaggcctgttctaatctttcaatcatttgttctcttggcattccgatattctctaagccaaatacaacatcatcttgcactgttgttccaacaaattgattatctggattttgaaataccattccaatttgttttcgaacatcccataccgtttcctctgataaaaccattgtatcatttactgtaatagtccctgcttctggcaaaaacaaaccattcaataattttgcaagtgtagactttcctgaaccgttttgtccaataatagatacccattctccctcatataaggaaaatgaaacatcttttaatgcataagtggctgccccaggatattgaaatgatatattttctatccgaagtttctcttttttcaatataaggcaccctttccttcgcacagttagcctatttttatatttaaaaaaaagggccatgaccagtttcttgaaaagaactgtcctgcccttttaattatcattatactaactcgataattaccattggtgctgcgtctccgcgacgtggaccaatttttgcaatacgagtgtatccgccttggcgctcagcatagcgtggagctacatcagcgaatagtttttgaagtgcatcttgaccagtctcagcgttagctacttcattgcgaatgaaagctgctgcttgacgacgagcatgaagatctccgcgtttacctaaagtgatcattttttccactacagaacgaagttcttttgcacgagtttctgtcgtttggatgcgctcgttgataattaaatcagtagctaaatcacgtaacatagctttacgttgcgcacttgtacggcctaattttctgtatgccattcgtagttccctcctttgttgatgggtttaaatcctcagtcgtctttacgtaaacctaaacctaattcctcaagtttatgtttaacttcttctaaggatttacgtcctaagttacgaactttcatcatatcttcttctgttttgttcgcaagctcttgtacagtattaattcctgcacgttttaggcaattataagaacgaacagaaaggtctagttcttcgatagtcatctcaagaactttctctttttgatcttcttccttctcgaccataatctcagcattttgtgcttcatcagttaaaccaacaaagatatttaaatgctcagttaagattttggcacctaaagagatagcttcttttggcccgatgcttccatccgtccatacatcaagcgtaagcttatcataattagccacttgtccgacacgtgtcttttccacttggtaagtcacacgtgatactggagtataaatagaatcaataggaattactcctattggttgatcttcgcttttatttgcatcagctggcgtatacccacggccacgctttgcagttaaacgcacgcggaaatgcgcatcttttgctaacgttgcaatgtgtaaatctggatttaagatttctacatcactatcgtgagtaatatcagcagctgtgacaataccttcgccctgtacatcaatttccaacgtcttctcttcttcagagtagattttaagagctaactttttcaagtttaagatgatcgtcgtaacgtcttctactacgccctcaactgttgaaaattcatgtaatacgccatcgatttggatagcagtaacagcggcaccagggagtgaggataaaagaatacgacgtaaggagttacccaaagtagtaccatatccacgctcaagcggttcaattacgaatttaccatatttagcatcttcgttaagttcaaccgtttcgattttcggcttttcgatttcaatcattaactaaaccctccttcaaaacgtcgaaaccccggttaaacaaaggtataacccctgtctaaccgaaagtcccccttaggcagttcccgattgtgcacaacaagcgatgtttctgtacgaaatttctcgataatgcatcatatccattatagacaaaagggaaaattctatacagaaaaattacacacgacgacgttttggtggacgacatccattatgaggaactggagtaacatctctaattgctgttacttctagacctgcagcttgaagagcacgaattgcagcttcacgaccagcaccaggacctttaacagtaacctctaaagtttttaaaccgtgttccattgcagctttagcagcagtttcagcagccatttgcgcagcgaatggagtagatttacgagatccacggaaaccaagtgcaccagcactagaccaagaaagtgcgttaccgtgagtatctgtaagtgttacgattgtgttgttgaaagtagaacgaatatgagctataccagcttcaatattctttttcacacgttttttacgagtgtttgttttacgtgccattgttagttcaacctcctttacttattatttctttttatttgctactgtacgacgtggacctttacgtgtacgagcattgtttttagagttttgaccacgaactggtaaaccacgacggtgacgaagaccacggtaagaaccgatctccattagacgtttgatgttaagagatacttcacgacgaaggtctccctcaactttaatacgatcgatgatatcacggatacgtcctaattcgtcttccgttaaatcacgaactcgtgtttcttcagaaatacctgcttcagcaagaattttttcagcagttgtgcgaccaatgccgaatacgtaagttaaagaaataacaacgcgtttgtctcgaggaatatctacacctgcgatacgtgccattacgaatgcacctccttctgattaaccttgtttttgtttatgtttagggttttcacaaataaccattacttttccacgtctacgaataactttacatttttcgcagattggtttaactgacggtcttactttcatgtctcgaacctccttaaagattacggagtgctatattatttaaaacggtacgtaatacgaccacgatttaaatcgtacggagataattctaccgtaactttgtctcctggtaaaatacgaatgaagttcatacggattttaccagaaacgtgagccaatacgacatgcccattctctaattctactttgaacatagcatttggcaacgtttcaagaacggtaccttcgacttcaattacatcatctttagccattcaatagttctcccttcttcaaatcagtaacattttacactgctctgaaatcccggagagccagctacttataaagtggtaaggatttcgtatcctgcttctgtaagagcaatcgtgtgctcaaaatgggcacaccatttaccatctaccgttaccactgtccagtcatcagatagtgtttttacatatcgtcttccttgattcaccatcggctcaacacagatgaccattcccggctttaatctagggcctctatttggtggaccatagtgcgggatttgagggtcctcatgtaagtcttgcccgattccgtgaccaacatactccctaacgatcgagaatccattctcttcagcatgggtttgaaccgcatgtgagatatttgataatctctcgcctggttttacttgttctagaccaagatacaacgatttttctgtgacatcaagtagcttttgaacagattcagaaatgtttccaactggatacgtccatgcagaatctccatggtacccattgtatttcgcaccaatatcgatactgatgatatcgccctctttgagcttgcgcttccctggaattccgtgtacaagctcttcatttacagaagcacatatgctccccggaaatccgttgtatcctttaaaagatggcgtagcaccatatttttgaatcgtcttttccgctatttgatcgagctctttcgttgtaattcctggagtaatgtgctgtttcaactcttgatgagtcaaagcaacgatcctgccagcttctcgcatgatttctatctcgcgaggagttttgcagattatcattacgctaagcctccgatgagaacatcgatatcagcaaatactttattgatatcttgctcaccattaatgctttgtaagtaaccaagctcttcgtagaaatcaagcaaaggttttgtttgcttaatatttacatctaaacgatttgctacagtttcttcattgtcatcagagcgttgatataattcgccaccacatttatcgcacacatcagcttttgctggtggattgaattctaagtggtaagtcgcaccgcactctttacaaatgcgacggcctgtaaggcgttttaataacaaccctgaatccacattaatgtttaaaacatagtcgatttttttgccaagatctttcataatttcttcaagagctgatgcttgtgcaacagttcgtgggaaaccgtctagtaagaaacctcttacgcagtcgtcttgacttaaacgttcacgaacgattccgatcgtaacttcatctggaacaagtgcacctttatcaataaaagattttgcttgtagacccatttcagtttcagccttcatagctgcacggaacatgtctcctgttgaaatgtgagggatgttatacttggcaacaatctgttcggcttgtgtacctttaccagcaccaggaagccccattaaaattaagttcatccttgttccccctcagagtacatgagcatgtagggaagacaattcttcccacttactcactgcttgataaaccctttgtaatggcgttttaccagttggctttctagctgcttcattgtttctaaagcaacgccgacaacgattaacatactcgttccaccgatctgtgcagatggaggaagatttcccaatttcgtaaagataactggtaagattgcaatcgctgctaggaaaattgatcctacaaaggtcaaacgatacaagatttttgttagatattgttccgtattcttacccggacgaatacctggaacatatccaccttgcttgtttagattctctgacatttgctctggattaacctgaacaaatgcatagaaatatgtgaaggctacaatgagcgcaacatatatgatcattcccactgggtgagaatagttaaagtttgcaataatccactgcgatacatcatgtttcgggaagaactgtgcaatagtcggaggcgtaattaagaatgaaacagcaaaaattactggaataacaccagcactattcaccttaagcggtaaatgtgtgttttgtgctccagcataaccaccatttcctcctgttacacgcttcgcatattgaattgggatctttctaacagcctgttgaatgaaaataacacccacaataactgctagcacagctagtaaaatcaatgcaactttaacgatactcatgaacaattgatctccgatattttgaaactgttgctgatacacttgagatataacacttgggatcgctgcggcaataccgccaaagataaggatggaaataccattacctacacctttagctgtaatctgttcacctaaccacattaaaaatgcagtaccagcagtcagtaccgtagcaatgtataaataagtgctccaacctggattcaaaattaattgtccacctaccataccgttaaaaccgattgacataccaaacccctgaataaacgcaagaacaattgtaaagtaacgcgtgaattgcgttaatttacgacggcccatttcaccttgcttcgaccattccgaaaatttaggaacaacatccatctgcaataattgcacgatgatggatgctgtaatatacggcatgattcccatcgcaaagatggagaagtttttcaaggctccaccgccaaatgtatttagaatacctaaagcatttaattgatcttgtgccttcagtacgtctccatttgtaaatggcacggggataaacgtgccaatcctgaatacgattaacatcgctaaagtgaataatattttacgtcttatctcagcaacgcgcataaagttggagattgtacgaaacattagatcacctcaactgatccgccagctgcttcaattgcttctttagcacttgaagagaacttgtgcgctttaacagttagttttttctctactgctccgcttgcaagaactttaacaccgtcgtttaacttgctgataacgccagtttccagcaataattcaggtgttacttctgtaccatcttcaaaacgatttaacgttgataagtttacaatagcaaactctttacggttaatgtttgtgaagccgcgtttgggtaaacgacggaataatggagtttgaccaccttcgaagccaagacgaacaccgccgccagaacgtgcgttttgtcctttatgacctttaccagcagttttaccgttaccagaaccgataccacgaccgacacggttacgtactttacgagaaccttctgcaggttttaattcatgaagtttcattcccaggcacctccttatattaatgagttatccttaagcttcttttacagttacaaggtgagaaactttgttgatcataccaagaatagcaggagtttcttccttaactacagttgaattcaactttttaagacctaaagcttctaccgtcgcacgttgatcttgtggacgaccaattacactacgagtgagggtaatttctaactttttcgccatttgttttccctccttaacctagtagctcttctacagatttaccgcgtaattttgcaacatcttcagcgcgcttaagttcgcttaatccgttcacagtagcgcgaatcatgttgattggtgtgttagaaccaagagatttcgaaagaatatcttgtacaccagctaattcaaggaccgcacgaacaggtccaccagcaataacaccagtaccctcagcagcaggttttaagaatacttcaccagcgccaaaatgaccgttgattgtgtgtggaattgttgtaccaactaatggtacagcgattaagtttttcttagcgtcttcgatagctttacggattgcgtctggtacctcttgtgctttaccagtaccgaatccaacatgaccgtttttatcgccaactacaactagtgcagcaaagcggaaacgacgaccacccttaacaactttcgcgacacgatttatcgtaactacacgttcttcaagttctaatttacttgggtcaatgcgatgcatcaattttccctcctttgaccattaaaattgtaatccagcctcacgagcagcttcagctagagctttaacacggccatggtataagtaaccaccgcgatcaaatactacttctttaacgcctttctctacagcacgcttagcaactgattctccaactttcgtagcagcttcaatattgctagtaccgttaagagcaaggtctttatcaagagtagatgcacttactaacgttacaccattcacatcatcaataacttgagcgtaaatatgttggttagaacggaacacgtttaaacgtggacgctctgcagtaccagtaagtttagcacgtacacgtgcatgtcttttcttacgagtcgcatttttatcagctttagtgatcattcttgtcactcctttctctcacctaacgggtttacttagcagttttaccttctttacgacgaacaacttcgccttcgtaacgaatacctttacctttgtaaggctcaggagcacgtacagcacggatgttagcagcgaattcgccaacacgttgcttgtcgatacctttaattacgatcttagttggtgcaggtacttcaacttcaagacctgcttccggagtcatttctactggatgagaataacctacgcttaatacaagtttatcaccttgtttttgagcacggtaaccaacaccgactaattcaagtccgcgtgcgaaaccttcagttacaccttcaaccatgtttccgattaaagcacgagttgtaccgtgtaatgcacggtgttccttctgttcagatggacgctcaactgttaatgtattctcttcaattttgataagcatatcagcattgaaagtacgagttaattcacctttagggccttttactgttacagtattgtcttctgcaactgtaatagtaacacctgcagggatttcaagaatctttttaccaatacgagacatgtggtcacacctccgttcgttttaaatatatattaccaaacgtatgctactacttctccaccagtttgtaattgacgagcgtctttgtctgtcattactcccttagatgtagaaacaagagcgatacctaatccgttaagtacacgtggtacttcgtcagctttagcgtaaacgcgtaagccaggtttactgatacgttttaatccagtgattacacgttcattgtttgcaccatatttcaggaaaatacgaaggataccttgtttgttatcctcgatgtattctacatcacgaatgaaaccttcacgttttaaaagttcagcgatctcttttttgattttagaagcaggaacctctaatttctcatgacgtaccatgttcgcattacggatgcgagtaagcatgtctgcaattggatctgtcatcaccatgtgttttacctccttcccatttgtgggttttaccaactagcttttttaacaccaggaatttgacctttatatgcaagttcacggaaacaaatacggcaaagtttaaatttgcggtatacagaatgcggacgaccgcagcgttcgcaacgtgtatactcttgtactttaaacttaggagtacgcttttgtttcgctatcatagattttttagccacgttttcgcctcctctacttagcgttggcttccattatttttggaatggcataccgaattgtgttaaaagttcacgagcttcttcatcagttttcgctgtagtaacgattacgatgtccataccgcggactttgcttactttatcataatcaatctcagggaaaataagttgctctttaacacctaatgtatagtttccacgaccatcgaatgatttcttagaaacaccacggaaatcacgtacacgtggtaaagaaactgatactaatttgtcgaagaactcatacatttgctcgccgcgtaaagttactttcgcaccgattggcataccttcacgaagacggaaaccagcgattgattttttagcacgagttacaacaggtttttgacctgtgatttgtgttaattcttctactgcgttgtctaacgcttttgagttagataccgcgtcaccaacaccagtgttgattacgatcttttcgatttttggtacctgcattacagatttatagttaaacttgctcactagagcaggagtaatttccttttggaacttctctttaaggcgattcaatgaagtgacctcctttcttaagaaaattatttatctaataattcaccagatttttttgcaatacgaacttttttaccatcttctactttgaagcctacacgagtaggttcacctgttttcggatctaaaatcataacgttagaaacgtgaataggtgcttctttagtaataattccaccttgtggatttaattgagatggcttagagtgcttcttaacgatattgacaccctcaacgataacacggttttgctttgggaaagccacaaggataacgccttgttttcctttgtctttaccagtgattacctgtactttatcacctttttttacatgcatcttaattctgcacctccttagcaaggcaataccttaaattatagaacttctggagctaaagaaacgatcttcatgaagttgctatcacgtaattcacgagctactggtccgaagatacgagtaccacgtgggctcttatcgtctttaatgataaccgctgcgttttcatcaaatttgatgtaagaaccgtccggacgacgagctccgctcttcgtacgtaccactactgctttaacaacgtcaccttttttaacaacgccacctggtgttgcttgttttaccgtagcaacgataatgtcaccaatgttagcatatttacgaccagagccgcctaatactttaattgttaaaagttcacgtgcaccagagttgtcagcaactttcaaacgagattcttgttggatcatgttatgaaacctcccttcggactaaaaattccgattcgtctatttagataataaccgcttcttcaacgatttcaactaaacggaaacgcttagtagcagaaagcgggcgagtttccatgattttaacgatatcgccaagtttcgcttggttttgctcatcatgggctttgtacttcttagaatacttaacacgttttccgtacaaggaatgagttttgtaagtttcaactaaaactgtaatcgttttgtccattttgtcagacactacacgaccagtataaactttgcgttggttacgttcgctcactatgcaaacctcccctcaatttatcgattaattccgatctctctttcacgaactacagttttcatacgagcaattgctttacgcacttcacgaatgcgagttggattctctaattgtcctgtagcaagttggaagcgaagattaaacaactcttcctttaaagctttaacttttgtttcgatttcggcagtggttaattcacgaatatcattagttttcattagattcaccaccattttcttcacgttttacgaatttacatttcacaggtaacttgtgagctgcaagacgtaatgcttcgcgtgctacctcttcagatacacccgcgatttcaaacataattttcccaggttttactactgctacccagccttctggtgcccctttaccggaacccatacgtacttctagaggttttgcagtgtaaggtttagaagggaaaattttaatccatactttaccgccacgtttcatgtaacgagtcattgcacgacgagcagcttcgatttgacggtttgtaatccatgaagcagcttgtgcttgtaaaccgaattcaccgaaagcaatttcagttccacctttagcacgaccacgcattttaccacgatgctctctacgatattttacgcgttttggcattaacatattattttcctccttcctcagaagctttcttttttgtaggaaggacttctccacggtagatccatacttttacgcctaatttaccgtatgttgtatcagcttcaactgctgcatagtcaatatcagcgcgaagtgtatgaagtggaacagttccttcactgtaagattctgcacgagcgatatcagctccgccaagacgaccagaaacctgtgttttaatacctttagcacctgcacgcatagcacgttgaataacttgcttttgtgcacgacggaatgatacacggttttctaattgacgagcgatgttttcgcctactaatttagcgttaagatcagctctcttaacttctaaaatgttgatgtgtacacgcttgcctgttaattggttaagagctttacgaagtgcttcaacttcagtaccacctttaccaattaccataccaggttttgcagtgtgaattgtaacatttacacgatttgctgcacgttcgatttctactttagcaacagcagaatcttttaagcgtacattaatgtactcacggattttgatgtcttcatgtaataatgtagcgtaatctttctcagcgaaccaacgagattcccagtcacggataacgccgacacgaagaccaattggattaaccttttgacccatcgattatccctccttcttttctgataccacaactgtgatgtggcttgtgcgtttgttaatttggcttgcacgacccattgcacgtggacggaaacgttttaacgttggaccttcgtcaacgaaaactttttcaacaactaggttgttaatgtccatctcataattgtgctctgcatttgcgattgcagattttaaaactttttctacaactggagaagcagtttttggtgtgtggttaaggatagcaatcgcttcacccacttgcttacctcggattaagtctactactaaacgaactttacgaggagcaatacgaactgttctcgctactgctttagcttgcattgaagtgcctcctctcattatcttctagttttcttatcgtcagcaaggtgacctttgtacgtacgagttggtgcgaattcacctaacttatggccaaccatatcctcagtgatgtacacaggtacgtgtttacgaccatcatatacagcgattgtgtgtccgatgaactgagggaagattgttgaacggcgagaccaagttttaacaacttgtttttgctcagatgcaactaatttttccattttgctcattaagtgatcatcgacaaatggtcctttttttaagctacgagccattttggtgcctcccttcgtgattggcgtacggttctagaaatgaaccgtactacaatcccattattttttacgacgacgaacgatgaatttgtcagacgctttgtttttcttacgagtcttgaatccaagagttggtttaccccatggagacattggagacttacgtccgattggagaacgtccttcaccaccaccgtgtgggtgatcaaccgggttcattacagaaccacgaactgttgggcgtttacctaaccagcgagagcgacctgctttaccgattttgataagttcgtgttgttcgttacctacttgaccgattgaagcgcgacaagcagataatacaagacgtacttcaccagaagttaaacgtacaagtacgtatttaccttctttaccaagtacttgagcagatgtaccagcagaacgaactaattgtccgccacgaccaggcttaagctcgatgttatgaacaacagtacctactggaatgttgattaatggtaatgcgttaccgattttaatgtcagcttctgggccagacataacttccatacctacttctaaagatttaggagcaagaatgtaacgtttttcaccgtcaacgtagttaattaatgcgatattcgcagagcggtttggatcgtattcgatcgtagcaacgcgtcctggaattccatctttgttacgcttaaagtcgatgatacggtattgacgcttatgtccgccaccttgatgacgtacagtgattttaccttggttattacgaccagccttcttgcttaaaggagcaagtaatgacttttcgggtctatcagtcgtgatttcagcgaaatcattcgtagtcatattacgacgaccgttagtagttggattatactttttgattcccatctcaatttccctccttctttagtaagaattaaacgccttggaagatttcgatttctttgctgtcagcagttagcttaacgattgctttacgacgacggctagtaaaaccagcgtgacgaccaacgcgttttgctttcggcttgtagttcatgatgttcactttttctactttaacaccaaagatcgcttcaagagcatctttaacttctgttttattagatttaacgtccacatcgaacgtgtattttttttcagccatcatttccatagaacgttcagtgataactgggcgcttaatgatatcacgaggatctctcattatgcaagcacctcctctactttttccactgccgcttttgtcatgattagcttatcatgatgaagcacgtctaaaacgtttacgccatcagcagtgattactgttactccagggatattgcgagcagataactctacagattcgtttgcatcagcagttacgataagagctttcttctcaacagttaatcctttaagtactgctagcatatcttttgtttttggtgcatttaacactaggtcttcaagaactacaatgttgttctcaactactttagtagctaatgcagatttgattgctaaacgacgaactttcttaggaagtttgtacgcatagcttcttggtgtaggtccgaataccgtaccaccaccacgccattgaggagagcggatagacccttgacgagcacgtccagttcctttttgacgccatggtttacgaccaccaccgcgaacttcagagcgagtttttactttgtgtgtaccttgacgtaaagatgcacgttgcatcattacagcttcgaaaagtacagcttcatttggttcgataccgaaaatagcttcagctaattcgatttcaccaacctgtgaaccagtttggttatatacagtaacttttggcattggaattcctccttcctattgtgaattatttgctaaccttcacagcgccttgaacaactacaagagatttcttagcacctggaacgttaccttttactagtaataagttgcgctcagtgtcaacttgaacgatttctaagttttggatagtaacttggtctccacccatacgtccagcaagttttttgcctttgaatacacggttcggagcaactgggcccattgaacctggacgacggtgatagcgagaaccatgagacataggtccgcgagattgtccgtggcgtttgataacaccttggaaacctttacctttagaaattcctgttacatcaacgatttcacctgtagcgaatacgtcaacttttacctcttgaccaacctctaatccgtccacgtctgcatcgcggatttcgcgaatgaagcgcttaggagttgtagatgctttagcagtgtggccttgttcaggtttgttagttaacttttcacgtttatcttcaaatcctaactgaattgcattgtagccatcagtttcagttgttttcttttgaagaacaacgtttggattagcagcgataactgttactgggattaactcaccgttctcagcaaatacttgagtcataccgatctttcttcctaagattcctttggtcatgagttacacctcctacatttttaagttatataaattatagtttgatttcgatatctacaccagatggtaagtctaaacgcattaatgaatctactgtttgtggagtaggactcacgatgtcgattagacgtttgtgcgtgcgcatttcgaattgctcacgagaatctttgtacttatgaacagcacgaagaattgtgtaaacagttttttcagttggtaatgggatcggaccagaaactgttgccccagaacgcttagctgtttctacaattttctcagctgactgatcaagaatacggtgatcgtaagcttttaaacggatacgaattttttcttttgccattattttccctccttcgttcgcctatttctaaaatagaccttctccatggaaatttccccacaccatgccatggcaaagcggccgggtgtgtcagcaaccttccacttcatcgcagtcaaagaccaacattgtctattatacaatgttattcgtctagatgcaagcatctttttgtttgcatctgcttttctctacttttgctattatacatggcactttaaagaatttcaagttttcatctaacagaattcattttacagtttctggattatcttttattgtttttatattactatagaagaaactcgtcaaaacaaaaaaacactctcttatcccttatataaacgcaaacaaaaaacctaagggaaaatcccttaggtttttttatatcagttaagattactcaacgatagtagcaactacaccgtaacctactgtacgtccaccttcacgaatagagaatttagttccctcttcgatagcgattggagcgataagttcgatagtcatttcgatgttgtcaccaggcattaccatttcagtaccttctggtaattggatgataccagttacgtcagttgtacggaagtagaactgaggacggtagttagcgaagaatggagtgtgacgtccaccttcttctttagataatacgaaaacttcagctttgaatttagcgtgagcttttacagaaccgctttttgcaagtacttgtccacgttggatgtcttcacgagcaaccccacgaagtaaagcaccgatgttgtctccagcttgagcttggtcaagaagtttacggaacatctctacaccagttacagttgtagaagcattttcttcagcaagaccgatgatttctactacgtcaccaactttaacgataccgcgctcaacacgaccagtagcaactgtaccacgacctgtgatagagaatacgtcctctacaggcattaagaatggtttgtcagtttcacgttctggagttgggatgtaagcatcaacttcagccattaattcaatgatttttgcttcccaatcagcttctccttgaagagctttaagagcagaacctttgattacaggaatgtcgtcgcctgggaatccgtattcagataataggtcgcgaacttccatttctactaattctaataattcttcgtcatctaccatgtcgcatttgtttaagaatacaacgatgtaaggaacacctacttgacgagaaagaaggatgtgctcacgtgtttgaggcattgggccatcagcagcagatactactaagataccgccgtccatttgagcagcaccagtgatcatgtttttaacatagtcagcgtgacctgggcagtcaacgtgtgcatagtgacgagtttcagtttcgtactcaacgtgtgcagttgagattgtgataccgcgctctctttcttctggagcagcatcgatttgatcgtatccgcgtgcttcagcaccaccagcttttgcaagaactgtagtgatcgcagcagttaatgtagttttaccatggtcaacgtggccgattgtaccgatgttaacatggggtttagaacgttcgaatttagctttagccattctaaattcctccttagtttatataggttattttatatttagactagaaagtgaaacttacgtcccactttctaagcttacataagtagttatacttgaacaatcgataaaaatcaattattcacctttattttttttgataatttcttcagaaacagactttggtacttcttcatagtggtcaaacaccatagagaatgttccgcgtccttgagtgttagaacgtaatgacgttgcataaccgaacatttcagaaagtggaaccatagcgcgaacaacttgtgcgttaccgcgagcttccataccttctacacgtccacgacgagatgttacgtcacccataatgtcacccatgtactcttcaggaattacaacttcaactttcatcattggctcaagaattactgggctacatttagaaaccgcagctttaagtgccatagatgcagcgattttgaacgccatctcagatgaatcgacatcatggtaagatccgtcaactaatgcagctttaatgtcaactagtggataaccagctagtacaccatttttaagtgcatcttcaagacctgctccaacagctgggatgtattcacgaggaactacaccaccgacgatcttgttttcgaattcgaatcctttaccttcttcgttaggttcaaactcaatccaaacgtgaccgaattgtccacgaccaccagattgacgagcgaacttaccttcaactttcgcagcagcgcggaaagtctcacggtatgctacctgaggagcaccaacgtttgcttccactttgaattcacgacgcatacggtcaacgatgatatcaaggtgaagttcacccataccagcgatgatagtttggccagtttcttggtcagtgtgagcacggaatgttggatcttcttcagaaagcttagataatgctgtacccattttatcttggtcagctttagattttggttcgatagctacagagataactggctctgggaattccatagactcaaggataacaaggctcttctcgtcacaaagagtatcaccagtagtagtatcttttaaacctacagcagcagcgatatcaccagcgtaaactgttgaaatctcttcacggctgttagcgtgcatttgtaggatacgacctacacgctcacgcttacctttagttgagtttttcacgtatgatccagagtttaacacaccagagtacacacggaagaacgttaacttaccaacataagggtcagtcatgattttgaatgctaaagctgcgaatggttcttcatcgctagacttacgttctacttcttcatctgtatccggtagagtacctttaatagcaggtacatctagtggagatggaaggtagtcgataactgcgtctaacagaatttgaacacctttgtttttgaatgcagaaccacagattactgggaagaattctacagaagttgtagccttacggataccagctttaagctcttctacagtgatttcttcaccttctaggtacttcatcatcatttcttcatcaagctcagctaccgcttcaataagttttccacggtattcttcagctaattctttgtgctcttcaggaatttcaacacgttgaatgtctgttcctaaatcgttaccgtacatgtaagcacactcttcaacaaggtcaatgataccattgaactcatcttcagcaccgattggtaactgaattggatgtgcgtttgcttgtaaacgatcgtggattgttcctacagagtataagaaatctgcaccgatcttatccattttgttaacgaatacgatacgaggtacgccgtaagtagtagcctgacgccaaacagtttctgtttgtggttctacaccagattgcgcatcaagtactgctacagcgccatcaagtacgcgtaaagaacgttctacttctactgtgaaatctacgtgtcctggagtatcaatgatgtttacacgatgacctttccattgtgctgtagttgcagcagaagtaattgtgataccacgctcttgctcttgctccatccagtccatctgagatgcaccttcgtgagtttcaccgattttatgaatacgtcctgtgtagtacagaatacgctcagttgctgttgttttaccagcatcgatgtgagccatgataccaatattacgagtgttttctaaagagaactctcttgccatttggtgtcttgctccttccatatatggattggatttttttattttaagtagcaaaaaagccactttatattgttacacatgtcagtatgtccagtactctcattatgtaaaacgagcgcccgatgaaagggagaggcattctccctctccacacttccataagcgacaaataaagcggtttatgcttacatttattttacgttgaatcctaccaacggtaatgagcaaatgctttgttagcttctgccattttatgagtgtcttcacgtttcttaacagatgcaccagcgttgttagctgcatctaagatttcgttagcaagacgctcttccatagttttttcaccacgaagacgagcgtagtttactaaccaacgaagacctaaagttgtacggcgttctggacgaacctcaactggaacttggtagttagcaccaccaacacgacgagcgcgtacttcaagaacaggcatgatgttcttaagagcttgctcgaatacttccattggctctttaccagtacgttcgtttacgatatcgaacgcattataaagaattgtttgagatttaccttttttaccgtcaaccatcattttgttgataaggcgtgttactagcttcgaattgtacattggatctggtaacacgtcacgtttcgcaacaggtcctttacgaggcatattgagttcctcctttcattttaaagttattattttttagcaggttttggtctcttagtaccatatttagaacgtccttgcatacgtttgtcaacaccagctgtgtcaagcgcaccacgaacgatgtggtaacgtacccccggtaaatcctttacacgaccaccgcgaattaatactacgctatgctcttgtaggttatgaccgatacctgggatgtaagctgtaacctcgataccgtttgttaaacgtacacgagcgtatttacgtaacgctgagttaggtttctttggagtcattgtaccaacacgagtacatacaccacgtttttgaggtgcagagatatcagttgattttttctttaaagagttaaaacctttgtttaacgcaggtgatttagatttccatactttatcagtacgaccatttctcactaattggttaatagtaggcatttgattatcctcccttcgcatgtttgtatgaccacatatccaggtggttcattattagttgaaaacaaagtttttgcaaggaagagcaaatgctctctcctcacaaaaacagttttaacttattattcctattgctgaagctcccacttgaatccccgaagctttaccaagcttacgaactgattcaacttttgttatgggcacgttatattgcattgcaacacgaatgatagcatgggttaaccgcatgtcagcatcctctgcgatgacaacttctttaactgtaccatttttgattgcctccaatgtgcgtttatgaccaacgactacattttcagcagttgatactttttgataagacatataaatatcctccaaagcatcgttcaggagcaaccttgattatagtaacattttgactcatacaatgtcaactaagattaattgtttttatacaaaatttatgccggaaaattttactgttccacataaacctcatcgttttctacattcatgtcatcttgtgttgtttttacaagatccactttgcgataacgattcatacctgttccagcaggaacaagtttaccgataataacattttcttttaatcctagaagttcatcgcgtttacccttaattgctgcatcagttaagacacgagttgtttcttggaacgatgctgcagataagaatgaatctgtttcaagtgaagcttttgtaataccaagtagaacaggtctagctgttgctggttgcttaccttgcagtaagaccttagcattcgcatcagtgaactgatggatatctagtaatgttcctggtaatacatctgtttcacctgcatcacttacacgaactttacgtaacatttgacgtaccattacttctacgtgtttgtcaccaatttctaccccttgcatacggtatactttttgaacttcacgtaataagtattcttgaaccgccgtaatgtccgttacttttagtaattctttcggatcaatagaaccttctgttaactctttaccgtggctaattggctgtcctggagttactttcagacgagcaccgtaaggaatagcatacgtacgagcttcaacttcaccctgtacaactacttcttggcgatctttaacgtcgttgatcgctgcgataacaccgtcgatttcactgataactgcctgacctttcggattacgagcttcgaagatctcttggatacgaggtaaaccttgagtgatatcatctccggcaaccccacctgtatggaatgtacgcatcgttaactgtgtacctggctcaccgatagattgagctgcgataatacctaccgcttctcctacttctacgtctgttccagttgctaagttacgaccgtaacacttcttacatacaccgtggcgagtgttacacgtaaacgctgaacgaatgtttacagtttcaacacccgaattttcaacgatatgagcgatatcttcagtaattaattgattttcagcaactaatacttcacctgtttcaggatgttttacagtttttcttgcaaaacgtccaacaagacgatcatataatgactcgataacttcattaccctctttaatcgcaccgattaataaaccgcgatctgttccacaatcatcttcacgaacgattacatcttgtgcaacgtcaacaagacgacgtgttaagtaaccagaatcggcagttttaagtgctgtatcagcaagacctttacgcgcaccgtgcgtagagatgaagtactcaagtactgttaaaccttcacggaaactcgatttgattggaagttcgatgatacgaccagatggattggccataagaccacgcataccagcaagctgagtaaagttagatgcgttaccacgggcacctgagtcactcatcatgaagattgggttgcgtttattcaaggatttcatcagttttccttggataacatcttttgcattactccaaatagagataacgcgatcgtaacgttcttcttccgtgattaaaccgcgacggaattgtttaattacattatctacttttgcttgtgcttcgtggagaatttcatctttttcgcctaatacaagaatgtcagataccccaactgtaataccagcttttgtagagtacttgaatcctaagtttttcatacggtcaagcatgcgagacgtttctgtaatttggaaacgtttgaatacttccgcaatgatgttaccaaggattttcttgctaaatggcgccacttcttcgcgactagcaataatttctttaatgttcgcacctttttcaacaaaatatttcgctggtgtttctttttcaaggtttgaatttgttggttcattaatataagggaacgactctggtaagatttcgttaaatattaatttaccaactgttgttaatagaagcatactcttttgctcttcagtaaatgttgcgttgtttactgcacttgcagctactgcaacacgtgtatgaagatgaacatatccattttgatatgcaagcaatgcttcgtttgcatctttgaagaccataccttcaccgattgcaccttcacgctcaagtgttaagtaatagttacctaataccatatcctgagatggagtaacaactggtttaccgtctttcgggttcaagatgttttgtgccgctaacataagaagacgagcttcagcttgagcttctgatgataaaggtacgtgaacggccatttggtcaccgtcaaagtccgcgttgtatgcagtacatacaagtgggtgaagacggattgcgcgaccttctactaatgtaggttcaaacgcctggataccaagacggtgaagtgttggtgcgcggtttagaagtactggatgttctttaatcacagactctaaaacgtcccaaacttcaggttgtacacgctcgattttacgtttcgcactcttaatgttatgtgctaatcctttttcaactaactctttcattacgaaaggtttgaacagttcaagcgccatttcttttggtaatccacattgatacatctttaagttcggtcctacaacgattacagaacgaccagagtagtcaacacgtttacctaataagttttgacggaaacgtccttgtttacctttaagcatgtgagatagtgattttaatggacggttacctggtccagtaactggacggccacgacgaccattatcgattaatgcgtctacagcttcttgtaacatacgtttttcgttttgaacgatgatgcttggtgcacctaagtccaatagacgttttaaacgattgttacggttaattacacgacggtataagtcgtttaagtcagaagtagcaaaacgtccaccgtctaactgtaccattgggcgtagttctggcggaattactggtagaacatctaagatcatccaagacggttcatttccagagttacggaatgcttctaatacttctagacgtttaatagcacgagtacggcgttgtccttgtgctgtttttaattcttcttttaagaagtctacttctttatctaaatcgatgtcttgtagtagctttttaattgcttctgcacccatagcagcttggaatgtgctaccatatcgatcacgatatgcacggtattctttttcagaaagtaattgcttcttatcaagtggtgtatctccactttctgttacaacataagaagcgaaataaattacttcttcaagcgcgcgaggggacatgtctaagacaagtcccatgcggctcgggatacctttgaaataccaaatatgagatacaggagcagctaattcgatatgacccatacgttcacgacgtacttttgcacgcgttacttcaacgccacatcgatcacaaactacacctttataacgtacacgtttgtattttccgcaatgacattcccagtccttttgtggtccgaaaatacgctcacagaacaagccatctttttcaggctttaacgtacgatagttaatagtttctggtttcttaacttcaccgtatgaccaagaacgaatcttgtcaggtgaagcaagtccaatcttcatatattcaaagttatttacatctatcaaggggcctacctcccttttagtctacaggttatcccaattattccttagttgtctcaacttcgacattcaatttatctgctgattgatgatcatcgtcatcttctgtatcacgcatttcaatttctgtatcgtcgctagacatcattttaacgtccatacctaaactttgcagctctttaatcaatactttgaatgattcaggaacgcctggttctggaacattttcgcctttaacaattgcttcataagtcttaacacgtccaacaacatcatcagacttcactgttaagatttcttgaagagtataagcagcaccgtaagcttcaagtgcccaaacctccatctcaccgaaacgctgtccaccgaactgagctttacctccaagaggttgctgcgttacaagtgagtatggtccagtagaacgagcatgaagtttatcgtcaaccatgtgcgcaagtttaatcatatacatgacaccaacagatacgcggttatcgaatggttcaccagtacgtccgtcatacaggattgttttcgcgtcatttgccataccagcttcttcaattgtgccccaaacatcttcctcacgagcaccatcgaatactggtgttgcaatgtgaatgccaaggtatcttgctgccataccaagatgaagctctaatacctgaccgatattcatacgagatggtacccctaatgggtttaacatgatatcgattggcgtaccgtctggtaagtaaggcatatcttcttctggtaaaatacgagaaataacacctttgttaccgtgacgtccggccatcttgtcaccttcagaaattttacgtttttgaacgatatatgcacgtacaagttgattcacgcctggtggcaattcatcgccatcttcacggttgaatacttttacgtctaagataataccgccaccaccgtgtggtacacgtagtgatgtatcacgtacttcacgcgctttttctccaaagatagcatgtaatagacgttcttcagctgttaattctgttacacctttaggtgttactttaccaacaagtaaatctccatcttttacttcagcaccaacgcgaatgataccgcgctcgtcaaggttacgtaatgcgtcttccccaacgtttggaatgtcacgtgtaatttcttctggtccaagtttcgtatcacgagcttctgattcatattcttcaatatgaatagaagtgtacacatcatcttttacaaggcgctcactcatgatgatcgcatcctcgtagttataaccgtcccaagtcatgaagccaacaagcacgttacgtccaagtgctagttcacctaattccatagaaggaccatccgcaaggatttcaccttttacaacttcatttccaacacttacgattggacgttggttgtaacaagttccttggttagaacgaatgaatttttgcattttgtagcgatctaagtcgccttttactgtttgaccgtcaacttctacatagcgacgtacccaaacttcacgtgcttctacgcgctcaacaacaccaggatgtttacagattactgcagcacctgagtcttttgctgatacgtactccatacctgtacctacaatcggagattccggattcattaacggaaccgcctgacgttgcatgttcgctcccataagtgcgcggttagagtcatcgttttctaagaacggaatacaagctgtcgctgccgacactacttgttttggagatacatccatgtagtcgatgcgttctctatttgtgacaatgttttcaccacggaaacgagctacgatatcttcacttaggaattcaccttcgtcagataatttcatattcgcttgggctacaacataattatcttcttcatctgctgttaagtaatcaacatgccctgttacaagaccagtttctgggtcaacacgacggtatggtgtttcaatgaaaccaaactcatttactttcgcgaacgaagataatgagttaatcaaaccgatgtttggtccctctggtgtttcaatcggacacatacgaccgtagtgagagtaatgaacgtcacgcacttcaaagcctgcgcgctcacgcgttaaaccaccaggtcctaatgcagatagtcttcgtttgtgagttaactctgctaatggatttgtttggtccataaactgagataactgagaacttccgaagaactctttaatagatgcaataacaggacgaatattaattagtgcctgtggtgtaatcgcatttgtatcttggatcgacattctctcacgaacaacacgttccatacgagaaagaccgatacggaattgattttgtaatagttctccaacagaacgcagacgacggtttcctaaatggtcaatatcatctgtatcccctactttgtatagtaggttgaagaagtaactgatagaagcaaggatatcacctggtgtgatgtgtttcacatcacgagtaatgtttgcattaccaattacattaattacgcgttcgccttccgactcaggagcataaatcttaatagattgcagctcaacatcgccttctaccactccacccattggtttcgctgttttgaatccaatgtttttctctaagtaaggtaaaatgcgatcaagtgtacgacgatctaagattgttccttctgccgctaaaatttcaccagtttctggatccactaatgtttcagctaaacgttgattaaacaatctgtttttaatgtgtaacttcttgttgatcttatagcgacctacatttgctaaatcgtagcgctttggatcgaagaaacgagacacaagtaagctcttagcattttctactgttggtggttcaccaggacgtagacgctcataaatttcaagcaatgctttttctgtgctatctgtgttgtctttttctaatgtgttgcttaagtattcgttatcacctaaaagctcggtgatttcttgatcagagccaaaccctaatgcgcgtaacaaaacagttacaggaagtttacgcgtacggtcaatacgcacatatacaacatccttagcatctgtctcatactctaaccaagctccgcggtttggaattacagtagcagtaaaaccacgttttccgtttttatccactttgccactatagtatacgcttggagagcgaactaactgggaaacgataacacgttctgcaccgttaattacgaatgttccagtctctgtcatgagtgggaaatctcccatgaacacatcttgttcttttacttcaccagtttccttgttgattagacgcacttttacacgaagtggtgctgcatacgtcacatcacgctctttgcattcgtctacagagtatttaggttcacctaagctgtagtcgataaattcaagcgatagatttcccgtaaagtcttcaatcggagaaatgtcttggaacatttctcgcaaaccctcatcaagaaaccactgataagaagaggtttgaatttcgataagatttggtaactctaatacttcactaatacgggcataacttcttcgttggcggtggcgtccgtattgaactagttgacctgtcaactgcttcacccctcaaatcatgagtattataaatgcacaaaaaaatttgtgcaaaatcacaaataaatacaactactgctattagcgtagtctctttctcttaaagataaatacgttgagtctttctacctgctcaaaaaagaaaaatggcttctataagaaaaccatcattctgtttcataatctgctgattttactatcttttccaagagaaacaaaaatatacatctttctcaacgcagaaaatcatatattggcattgtataatgttaacatagccaaaaataaccgtcaacgtttttttgattttatgatataatatccttttttcttttctacaacctcaacttcagaaaatacttcttctagtttttttagcgcagacggtgcaccttgtttcttttgaataacaatccaaagctctccatctggaactaaatactccacagctttttctaaaatctcatgtacgatatctttacccgcacgaattggagggttagatagaatagcagcatacttaccatctacattttcatagacgctactttgaaaaatacgtatattctcgattttgttattagcggcgttttctttcgcaagcccaagtgccctctcgttcacatccaccatgtgaacttcacgaccttgaaactctttcgctaacgacaaaccaataggaccgtatccgcaacctacgtctaatatatcacctttaatatctggcatttgaaacgcttcaattaaaagacgggaaccaaagtccacttcgtttttcgagaacaccccatggtcagataagaaagtgaatcgagatccacgaagggcaaactcccatcgcttacgatcacttttactagaagggtcgttagaaaaataatggtctgccatatggccacctcttttctttacagttaaaaaaaagctcgcatgagagcgagctttttttaaagcatcaaaagttaattacttaacttctacagcagcgccaacttcttcaagtttagctttgatttcttcagcttcttctttagcagcagcttctttgattacttttggagtgttgtcaactaattctttagcttcttttaagccaagaccagtgatttcacgaacaactttgataactttgattttttgtgcaccagcgctagttagttccacatcaaattcagttttctcagcagcagcttctccagcgccaccagcaacagctacaggagcagcagcagttacgccgaattcttcctcgatagcttttactaagtcgttaagttctaatacagtcatagatttaactgcttcaatgatttgttctttagtcattgtaaatatcctcccttaaataggtttgtattgttttatcgataatacgtaattatcttttaaaaaattaagcgccttgctcttccttttggtctgcaactgctttagtagcaagtgcaaggttacggattggagcttgaagaacgctaagaagcatagaaagtaagccttcacgtgatggaagagtagcgattgctttaacctcatcaagtgttacaagtttaccttcgattacgcccgctttaatttctaaagcttcatgatctttagcgaagtcgtttaatactttcgcaggagcaactacatcctcgttactgaacgcgattgcgtttggtcctgttaagaattcatttaactcagccatttcagcagattctgcagcacgacgagttagagagtttttgtaaactttgaactcaacgccagcttcacgtaattgcttacgtaattctgttgcttcagaaactgttaaaccacggtagtcaacaacgattgtagatttactagcgcgaagtttgtccgcgatttcagttacaacttgttgtttagtttcgattactttgctcatgttattacacctcctgtagattatatagaagatgtaccgaaagtgcactaaaaacctccatgcccaacttgtagacatggaggcatatagtcacagaaaaaagattccgcttcgtatattaacacctaggtaggaaattaagtctattgacacctactgtctacggtacactaattaaattcacaacataaatgattatattaaaacttctttatgaagtcaacttccaaaatttacgctaatgtagaaacgtctacacgtacgccaggtcccattgtagaagcaactgttacgttcttcatgtaagtaccttttgcagcagctggcttaactttttgtaaagtgtcagcaattgttttgaagttttctactaatttagcatcttcgaaagatactttaccgattggaacgtggatgttaccagctttatcaacgcggtattcaactttaccagctttgatttcgttaacagctttagttacatcgaaagtaactgttccagttttagggtttggcattaaacctttaggtcctaatacgcgaccaagtttaccaacttcacccatcatgtcaggagttgctactactacatcgaaatcgaaccaaccttgttggattttaccgatgtaatcagtatcgcctacgaagtcagctccagcagcttcagcttctttagctttttcacctttagcaaatactaatacacgttgtactttaccagtaccgtgtggaagaacaactgcaccacggatttgttggtcagctttcttagggtcaacacctaaacggaatgcagcttctacagttgcatcaaatttagctgtgtttgttttctttactaattctactgcttctgttgcagagtaagcagctgcacgatcaacaagctttgcagcttctacgtactttttacctcttttagccatttttatttcctcctcgaatgtggttttagcggaataacctcccacgtttacgcctgttttcaggtataacctgaggatgagcgccatccatttatttaaaaacgataatcatttacgataataaaggttgcgaattggaattccagacccgcaaccttttttaaaaacaaatcgaattagtcttcgataacgatgcccatactgcgtgcagtaccttcaaccatacgcattgcagcttctacgctagcagcgtttaggtcaggcattttagtttcagcgatttcgcgtactttatcacgcttaacagttgccactttattacggtttggttcaccagaaccagactcaataccagctactttcttaagaagaacagcagcaggaggagttttagtaatgaaagtgaatgaacggtcctcaaataccgtaatttcaacagggatgataagaccagcttgatctgctgtacgagcgttaaactctttacagaagcccatgatgttaacacctgcttgtcctaatgctggaccaactggtggagctgggttagctttacctgcaggaatttgaagctttaccattttaattacctttttagccacgagacacacctccttaagtccgtgatgtggtcaattggacagtgatttgccctcccacgtcatattttatctgtaaggataaaatctttcaaaaaacgtctccgataacgaagacgtactgacttaaaagatattatcactttttacaattcatttcaagtttcattttataatttttcaatttgatggaagtcaagttcaactggagtctcgcgaccaaacatatccacaagcacgctaacctttttcttctccacatcaatttcttcaatagcacctgtataatctgcgaatggcccctcatttacacgtactgtctcatgaagttcaaagtcgaaatcaaccacttcgttgtccattcccatatgtttcataatggtaacaacttcctcttctaatagaggtgatggtttagatccagaaccagaagaaccaacgaacccagttacacccggcgtgttacgtacaacataccaagagtcatcagtcatgattaattctactaatacataacctgggaacacttttcttttcattaatttttcttttccgtttttcatttctacttctacttcttccgggacaacaacacggaaaattttatcttgcatacccattgattctacacgtttctctaggtttgcttttactttattttcatatccagaataagtatggacaacataccaacttttttccattcatttaggacgagcgtccttccctccctgacgtacatttttttgcgcaaatgaaaaaacccgttcaccgggcttttacacagttcttataaataacattatatcatggataagtgcttcttattcaagaattaaccaagaattaaccgaattaaagaagaaatgcccatatcaactactgcgaagaaaatcgcaaagaacacaactgtagcaacaacagtcgctgttgagcggagtaattcatcttttttaggccaacttacttttttcatttcgcgacctacatcgccgaaaaagttcgttaaacgcatctgcgggacctccagtgtattatttcaattatttattttgtttccttgtgaactgtatgctgattgcatgttttacaaaacttttttatttcaagtcgctctattgagctcgtatctttcatagtagagtagtttcgatttttacactcttcacatgagagtacaacttttttcctcattagttacaccaaccttgtaacattatgtccctaaaaatgtatcatacaataaaagacaatgtcaatgacatgcattttgtactctctacaaaagaaaacaggtgatttattttacacctgcagcacttgttacttcttatgaatttaaagttgtactttctctcatttccatatatcgttccaatttcctctttactctttgtaaagcgttatcaatagatttcacatgcctgtttaactgttctgaaatctcttgataagaacgaccatctaaatataaagaaagcactttcctttctaaatcgcttaataattcagatatttttgattctatgtctgtatattcttcctggctaatgatcatctcttcaggatcagtcaccttcgcttcagaaataacatccaataacgttcgatcagattcctcatcgtaaatcggcttatctaaagacacatacgaatttaaaggaatatgtttttgtcttgttgccgttttaatagcggtaataatttgtcgagtgatacatagttcagcaaatgctttgaatgaagacagcttgtcctctttataatcacgaattgctttaaacaaccctatcataccttcttgaacaatgtcttctcgatcggcacccactaaaaagtaagatcttgatttcgcacgaacaaagttcttatacttgtgaattaaatattctagagcgtcagtattaccttttcgaactaactcaacgattgcctcatcctctaaatcacgaaatgtaacgtcgcctatacttacgaagcctgcttccaccttgatccctccgaccgctatttatttagcaatattatacagtaaaaagataaagagcgtcaatgcttcaacgctctcctcttcttaatttttctaatttttctgtaatatccttactaaatatctttcgcatggcgggctgctgttctttcgtgtcttttgtacgccttcttacttgttgttccatcgcttgtacttccaactctaattcacgcgcagattttcgaagggcaccttgcccaaatataacccattgttctgtataatcagaagtcgcaacatatatttgtgtatttatatttctaagctctatcgcaagttgctctatcttttcgtctgcagtttgattctttcgtgtgaatattacttctacacgagattgtttcatctttttttcaataccatggactgtataggcatcaaagactatcatcacttttgtgcctgtataaccttgataatccgccatcttatcaataagcgcatctcttgatgattgtaaatctacatcccgcagtttcttcaaatctccccaagctccgataatgttgtagccgtcaacgattaaaatatcgttcattttttatttaccaatttcgtgacgtttacgatatacctcatacattaacaaacttgcggctactgaagcatttaaggatgtaactttaccaaccatcggtagagtgattaagaaatcacacttttcaccaataatacgactcataccttttccttcactaccaattactaatccaatcggcattgtaccatctaaattacggtaatccgttttccctttggcatctgtaccagcaatccaaagtccacgctcttttaattcatcaattgtacgagataagtttgttacgcgcgcaacaggaatgtattcaatcgctcctgttgatgctttcgcaactgatgcggtaagtcccacagctcttctcttcggaataataattccatgagctcctgttgcatcagcagtacgcataatagaacctagattatgcggatcttcaatctcatctaaaatcaagaagaacggatcttcattacgtttttctgccactttgaataaatcttctaactctgcatactgatatgcagctacttgagcaattacaccttgatgattaccctcaactaattgatctaactttttctttggtgcatgttgtaaaataatcttattttctttcgctaacgctagtacaatttgtacttgtcctttggcagcaccttctgcgatccaaattttattaatatctctccctgatcttaacgcttcaattacagggttacgtccgataatatattcactagtcatgatgatgtgcccccttccttttcttctaaaactgcaattgccttatatacaatttcgtctaatctttcacgattatttaataaatgatgataaccaattagtgcttcaaaggctgtactatgtcgatatgtttgtacatccgtatttttcggaactgtacctgaatttgcattacgccctcttcttaataccgcctcttcttcctctgtcaaaaatgccgtctctaataaatgataaacaactttcgcctgtgcttttgctgaaacaaagctcgtccctaagcgatgtaattgattagggcgaacttttcctttttgaaggaggtgatagcggatatattgttcatataccgcatcacccatatacgctaacgccaagctgtttaattgctttgcatcaatcatccttatcctcttttccatcttgtaccttgagcggtatcttctaaaataatattacgttcttttaaatcgtcacgaatttgatcagacaatgcgaaatcgcgatttttacgagcttcaatgcgcttttggataagctcttcaatttctttatccagtaattcttcttttgataattctaatcctaaaatatcaaataacgtttccagttgttttacgtatgcttcaatcacaactttagatgtatgctcttcaagtaaatattgatttgcatgatttgctacgttgtataattcggtaattgcatttgcagtgttaaagtcatcattcattgcctcttcaaatgcagtctggaatttctctatttcagctaaccatttctcattatggtccgttaaatccgtactactctccatacgatgctttaagtttccataagctgttttaattctttccagtccattattcgtactttgtaataactcttcactaaagttaatcgggtgacgatagtgtactgataacataaagaatctaattaactgcgggtcgtattgcttaataatatcgtgaactaaaataaagttacccagcgatttagacatcttctcattgttaatattaatatatccattatgcatccagtaacgtgcaaacgtttttccagtcaatgcctctgactgcgcaatttcattttcatgatgcgggaacgccaagtcttgcccaccagcatgaatgtcaattgtatcccctaaatacttacgcgccattgctgagcattcaatatgccatcctggacgtccttgcccccaagggctttcccagaagatttctccttctttcgcagctttccataaagcaaaatcaagagggtcttgtttcttttcccctacctcaatacgagcaccgtgacgtaaatctgcgattggttgatgtgataatttaccgtaaccttcgaattccttcgtcttaaagtacacatcaccctctgattcatatgcataccctttattcacaagttcttgaataaattcaataatgatatccatattttctgttacacgaggatgaactgttgcgtgtttgcaacctagtgctgttacatcttcaaagtacgcttcaacaaaacgatcagcaatcgttggtacatcttcacctaattcatttgccgctttaattaatttatcatctacgtccgtaaagttagatacatattgcacatcgtatcctttgtattctaaataacgacgcactgtatcgaataccataggaggtcttgcattcccaatatgaatgtagttataaactgtaggtccgcatacatacatctttaccttattttcttctaatggaacaaactcttctttttgacgtgttaacgtattataaatgtgaatagtcatttttatccttcctttctacctttaattccaattgtttcttcaatttatcaagttctacttccatagcctttaatttatcaaaaatcggatctggaaggtcagagtgatttaattcttgaccaatctttactccattttgaataacgacacggccaggtatacctacaactgtagaatgtgcaggaacttcttttaatacgacagaccctgctccgattttagaattctctcccacagtaatagacccaagaactttagcacccgtcgcaattaatacattatcctgaattgttgggtgcctcttccctttttcttttcctgtaccacctaatgtaaccccttgataaatcgttacattatcaccaatttcacaagtttctccaattacaactcccattccatgatctataaaaaagcgtcgaccaatagttgctcctggatggatctcaatgccagtaaaaaagcggctcacttgtgaaacaaaacgtgcaagaaagaaaaaatttcttttataaaaagcatgtgcaattcgatgggcccaaactgcatgtaatccagagtaagttaaaatgacttcgaaataacctcttgccgctggatcctgttcaaaaacgacttcaatatcttcccgaagcctcttaaacatcggtgttccctcccctttatgggctgcttttttgtcgaacgaactaactcccctaactcatcacttctcccctaattctttatataaggagataaattctatattcatacctatttacacggtataaaaaaaaggcgtctctgtcatattgacagagacgccttttaagcgcggttccactctgtttaggcttaaaaaagcctcaaactcatccatgataacggtgtacaccgctcctgcttactttgcggcctaagacatcccacgaagcaattcgctgttcagcagaagactcgaaggggcatttcaaaaatccgcttataaaccactcccagcctaaaggtggttctctctgtaaaaagcctgattttctacttctccttctcgtcgcttttccttattaggttttaggtatacttattatatttctaaacctagaaaatgttaaccaattactttttgaagacgatttaaaactttttcttttccaagaagtgcaatagcattcggaagctctggaccatgcgtttgtcctgtagttgcaacacggattggcataaataaatttttacctttatgtcctgtttccttttgaactgctttaatcgctgccttaattgctgctggctccattgcttctagagcttctatttgaccagcaaatgcacgaagtacttcaggtacttgttcaccatttaatacttcttgtccttcttcttcatagtcaacatgatctttaaagaacatttcagaaagctctacaatttcagctccaaaactcatttgttcatggtataaagcaattacatcacgaatccaagcttggtcttgttcgcttaaagtttctcccacacgtccagctttcactaaatgcggtaagcttaactctacaaccgtatctaaatcttgctttttcatatactggttgttcatccattttagtttttgagaatcaaataatgcaggtgattttgataaacgagctgcatcgaacattttgataaactcatctttagagaagatttcttcttctcctaccggagaccaacctagtagtgcaataaagttaaagattgcttctggaagatacccaagctctttatattgctcaataaattgaataatagattcatcacgcttacttaactttttacgactttcattaacaattagagtcatatgaccgaattgtggaatatcccagccgaaagcttcataaatcatcatttgtttcggtgtatttgaaatatgatcatcaccacgaagtacatgtgtaatttccattagatgatcatctactgctactgcaaagttataagttggaattccatcttttttcacaataacaaaatcaccgaaatcatttgaatggaacgcaacttcatcttttacaatatctttgaatgtgtagtcacgatcagctggtacacggaaacgaatacttggaatacgtccctcagcttcaaattctttcacttgttcttcagttaattcacggtggttacctgcgtaacgaggtgtttcaccgcgagcgatttgtccttcacgctctgcttctagctcttcttctgtcatataacatttataagctagaccacgctctaataaatcttcatataattttttataaatatctaaacgctctgtttggcgatatggtccaaattcaccaccaacatcaacaccttcatcccagtccataccgagccatttcaagtattttaattggctttcttctccaccagccacgttacgttttacatcagtatcttcaatacgaataataaatttgccatctaaatgacgagcaaataaataattaaataatgccgtacgcgcatttccgatatgtaagtgtcctgttggacttggcgcgtagcgtactctcacttgcttttccataattggtacaccttccatccttaatgtcaacacattctataattgtacaccaaaaaaatgtgattatccatcttacgaattaaaaaccattattttttctgtaataaaacaaccgcttgagaagcaatcccttcttctctacctgtaaatcctaatttttctgttgttgttgcctttacattaatgttatcgatagacgtttctaacagttcactaatgcgcttacgcatgctctcaatatgtggtgccatttttggttgttgagcaataattgtacaatctaaatttcctaactcgtaaccttgttcacgcacaaattcccaaactttttgtaacaatacagctgaatctgcatctttaaaagctgggtctgtatcaggaaagtgctttccgatatctcctgctgcaatcgcacctaaacatgcatcagcaatcgtatgtaacaatacatctgcatctgaatgaccgattaatcctttctcgtgtggaattgtaattccaccaataatcaacgggcgcccttccgcaaattcatgtacatcaaaaccttgtccaattcgaaacatccttacttcctccttaagctaaactactgagctttatgactctatattatatcgctatccttataaagaaaagcccggctgttgccgagcttttctttattaacacatcatcaacgttatttcttctgaacacgtaggaaactttcagcaattaatagatcttccggagtcgtcactttaatattatagtaactcccctctactacacctacttgcttcccaacacgttctacgagacttgcatcatctgtgccaagaaaacaactttgctttgcgcttctatgagcttctagcaaaagagaaacagagaatccttgtggtgtttgtacagcgttaagttgagatcgctctaccgtttctacaacaacaccctgctctactttcttaacagtatcttttactggcactgcacaaatggaagctccatatttttctgctgcaattaatacatcgcgaatcactttattcgttacgaacgggcgcgccccgtcatgcacaagaacatattcgacaccactcgcatactgaagtgcgttatatacgctatcttgtctttcggctccaccctgaataaattgtacgtgcttttcaatctggtacttctgcattaactcttcaaaatacgggcgttcttcttcgttaattgccataataatacttttgcacgctttatctttttcaaaagcacgcaatgtgtgcacaataattggtacttcatctataagtaaaaataacttatttttaccagcacccattcgttttccttggcccgctgccggaataattaatgtatacatattaataatcctctacttataatgctttttctagcaatttacgttttgcaaaaatcatacgaccagccgatgtttgtaatacgctagtaacaagtacgtcaagttgtgaacccacatactctctaccatcttctactacaatcatcgtaccatcatctaagtatgcaacaccttgattttgttctttaccatctttcacaacataaacacttaattcttcaccagggagtacgactggtttaatcgcattagctaaatcattaatgtttaacaccgtaaccccttgtaattcagaaactttgtttaaattgaaatcgtttgttactacagttccaccagtgatttttgccaactttacaagcttgctatctacttcttggatatcatcgaaatcgccttcataaatttctaccggaattggcatctccttttgaatacgatttaaaatgtctagccctctgcggccacgattacgctttaaagcatctgaagaatcggcaatatgctgaagctcttctaatacgaattgcggaatgacaattgttccttctaaaaactttgtttggcaaatatctgcaatacgtccgtcaataattacactcgtatcgagaattttccaatgagtcgtagatttttctgcttcgacctctacctcttcattctcactattgtttttcttcttacctccgcgttggggtaatgtaaataatcctagcaattcattcctctttttaaatcctacttggaatcctaaatatccaagtaaaagggtgaagaacacttgcaacaccgtactaataactggaattgtaaattcacgaattggtatcaaaattaaatatgcaacaataagaccagagattaatcctaatgtaccaaataaaacatctgctacaggcgcctttacaagagcctcttcaatatgcttaataagttgaacaatataatctacaagccaaaatgttgttaaaaataaaataattgcaccaataattgcacgaacatacgatccttccaacaaaggaaccgcaccgatatctaatacattaataatttttgggattaagtaaatccctaacgctcccccgatcactaaaaagaagagctgtacaatccgttttaacatccaaccacctcctactcattattaaccattgtttcgctaatcaaaacgccgaatgcaaaagcggacgtgtttttttgtaaatagttttatttaccaatatatcatatcatataccaaaaatgttctagtgtcgttatattatagaatcaatgtaatattcttaattgtgtctactcatatagagatgctcttgaattctttttagaccttctcgtattttcttcgctctcacttctccaattccttccacatcatccaattcattaatagttgctcggcaaacaccttgcaatgttttaaatcgattaattaaattctcgataataagtggcggaacacgagaaatcttgcttgtgattcggtaccctctaggtgtcacactttcttctaaacttgtttgtcctggatacccaagtaatttaactaaatcactatcctctaaaagttgtgtatttgcaagatcttgtaactttttcaagatttgatgatggtcttgtgttttctcctggtgataatctttaattaacaatgctgcctctgcctctaaatcagctagtaattctgtaagctgtaaacgaattaacctaccttctgttcctagctcatgaatatagctcaatatttcattttttatacgcagcaccatttcaacactatgtaaaacgtgaaccacctcggacattgtaacgacctcttcaaattctagaatacccaaattcgtaatgccgtcattccatacagccttatatttttctagcgtttgaattgcttgatttgccttcgttaaaatgacacctatatcttttagtgtataacgtaagttcccttgatatagcgtaattacattacgtctttgtgaaatggccacaacaaggctgcccgtctgctttgctacacgctctgctgttcggtgacgcatacctgtttcaatagaatcaatagatgaatccggaactaactgtgcgtttgcaattaaaattttacttccagtttcatttaaaataagtgctccatccatttttgctaattcatataaactagcaggagagaatgcgcaattaatatgaaaaccaccatcaacaatgcttttaatctgctcattatacccaagaacaattagtccccctgtttgtgcacgaagtacattatctatcccttcgcgcagtggtgttcccggggccacgagctgtaaaatattaattatacttttgacacgttgcttattttcttccatagcctagcctcctaatgtcaaacgaagcgcttctcctaaattagaaacacctacaacctcaatcccctctggaattgtccacccccctaaattttttctaggaatgatagcacgttgaaatcctaatttagctgcttcttgtacacgttgttcgattcttgatactcttcttatttctccagttaatccaacttctcctattaccgcatcagttggtgccgtagatttatctctaaaacttgaagctatacttaaggcaacagctaaatcaattgccggttcatctaatttcaaaccaccagctacttttaaatacgcatcttgattttgtaatagtaaacctgttcttttctctagtaccgccataataagcgagacacgattatgatcaattcctgtcgccattcttcgaggatttccaaaactagtaggggaaattaatgcctgtatttctactaaaactggtcttgttccttccattgaggcaactactgttgaacctgcaactccaactggtctttcctcaaggaaaatttcagaaggatttaagacttctgcaaggccaagttctttcatttcaaagatacccatttcattcgtagaaccaaaacgattctttacagctcgtaaaatacgatatgtatggtgtcgatctccttcaaagtaaagaactgcatcgaccatatgttctaacatacgcggccccgcaattgcaccttcttttgtcacatgtcctacgatgaaaattgggattccctttgtttttgcaagtttcattaattctgctgtacattcacgtacttgcgccacgctaccaggagctgatgtcacctcaggtaaatgtatcgtttgaatagaatcaataacaacaaaagcaggattcatctcttcaatatgtgctgcaatacgctgtaaatctgtctctgatacaacaaatagattactaccatttacatgtaaacgatctgcacgaagtttaatctgctttgctgactcctcacctgatatatacaatacatcatatgaagcatctgctaattgcgaggaaatctgtaataataacgttgattttccaatcccagggtccccaccaataagtactaaagatccatctacaattccgccacctagtacacggttaaactcctgaaattttgtttcaatacgtgcctcagactttgtttctacttctgtaagacgtcttggttttgttacttctgtttgaattgcatttgcataatttaggcgtctggatgatacaacgggttccatctcttcaacaagcgaattccattgaccacaccctggacatttacccatatattttggtgattgataaccacactcttgacatgtgaattttgttttctttttagccatatctttttatatttcacttcgctttcatctataaacatttgaccttctcgtacaagaaagagggctatctcgtagccctcttagtttgtctatacttattttaccttttcagcactatgaatgacaaatgtttccccttctacatcaaagataactttttgtcctttctcaatagcaccttttaaaagttcttccgatagtctatcttctacatgcttctgaattgctctacgtagtggacgagcaccatattcacgatcaaaccctttatcagcaatagctgcaatcgccccttctgttaattgcaattcaatttcttgttcttttaagcgattcactaactgatttaccataagagtcacaatttcttgaatatgttttttctcaagcatatggaatacgataatttcatcaatacggtttaagaattctggacgaaatgcctttttcagctcatccattactttacctttcatatccgaataatcacgactttcatcttgtacgttaaatccaagatgtttgttacgttttaacgcctcagcaccaacgttagacgtcataataacaatcgtattacggaagtcaactgtacgtcctttagaatcagttaaacgaccatcttccaatacctgtagtaaaatattaaatacatcaggatgcgccttctctacttcatctaataggacaactgaatacggcttacgacgaaccttctctgttaattgtccgccttcttcatacccaacatatcctggaggagaaccaactaagcgagaagttgaatgtttctccatatactcagacatatcaatgcgaatcattgcatcctcatcaccgaacatagattctgccaatgctcttgctaattctgttttacctacacctgttggtcctaagaaaataaatgaaccaattggacgtttcggatctttcagtcctgctcttgcacgacgaacagctttcgctacagccactaccgcttcatcctggccgatgacacgatcatgaagaatggattctaagtttaataatttatcagtctctgtttgtgcaagtttagaaacagggatacgtgtccatgtagaaacgacatttgcaatatcttctaccgtaacctctgaattttcttttccttgttgttctttccactgacgctttgtatcttccaatttctcacgtaagcgttgttccatatcacgtaaggaagcagccttttcaaactcttgactttgtacagccgcatctttttcttttcgaatttcctcaagattcacttcaagctcttttaagtttggtggtgttgtataagaacgtaagcgaacctttgaagcagcttcatcaattaaatcaattgctttatctggtaagaaacgatccgtaatataacgatcggaaagtttcacagctgcatcaattgcatcatctgtaatagacacacggtgatgggcctcataacgatcgcgtaaacctttcaagatttgagttgattcttctagactcggctcatcaacatgaattggctggaaacgtctctctaaagctgcatccttttcaatatatttacgatactcatctaaagttgtcgcaccaatacattgtaattctccgcgtgctaaagatggttttaaaatatttgatgcatcgattgcaccttctgctccacctgcaccgattaatgtatgaagttcatcaataaatagaataatattccctgcttgacgtatttcatccattactttctttaaacgatcttcaaactcaccacgatatttcgtcccagctaccactgttcccatatctagtgtcataacacgcttatctcttaacgtttcaggaacttcattatttacgatttgctgtgctaacccttcagcaattgctgttttacctacaccaggctctccaattaacactggattgttttttgttctacggcttaacacttcaattacacgttgaatttctttactacgtccaataacaggatccaaacgattctcacgtgcaacaactgttaagtcgcgcgctaaactgtctagtgtcggtgtattggcatttgtcgatgaaccaccttggtgacctgaacttgcctcgttacttccaagaagttgtaacacttgttgtcttgctttgttaaggctgacgcctaaattatttaaaacacgtgccgctacaccttcaccttcacggattaagccaagtaaaatatgttctgttccaacgtaagaatgtcctagcttacgcgcttcatccatagacaattcaataacttttttagcacgaggtgtataatgtacagtttgagaagcttctgttccacgtccaattaacgcttctacctctttttgcactttctccgggctcaatccaagagcaattaacgcttttgctgcaattccttcaccttcgcgtacaagcccaagtaaaatatgttctgttccaatattattatgcccaatgcgaattgcttcctcttgagataaagctaatactttctgtgctctttctgtaaatcttccaaacatcatagaaatcgcctcctacttgcgcttagtttttttcaatacgtaatcgctcacggattaaggttgctcttcgataatctctttcttctggtcctaaaggtcctcctgcgtattgttgtaaaatacctggttgcgtaagaaccattagctcagtcaaaatatttctcgatataccttttatatatcctagatcaataccaagtcgtacatccgataagcaagttgccgcttctgcagattgaattaaacgactatttgctagtataccgtaagaacgataaaccttatcttcaagctcaatactcgaattttgtacaattaattctctggccaatttttcttgttgtataatttgctgcatgacactctttaaatctgcaataatatcttcttcggatttccctagcgtcatttgatttgatacttgaaatatattacctaacgcttcgctaccttcaccgtatattcctcttactactaaacctaatttttgaattacttgtataatacggctaattctttttgttaaaaccagccctggtaaatgaatcattacagaagctcttaatcctgtaccaacgttagtaggacaactcgtaatatatccaagtgattcatcaaaagcatattcaacctctttctcaatccaattatctatttgattggcgctttgaagcgcctttgataactgtagtcctggaaataggcactgaatcctaatgtggtcttcctcattaagcatcacactaatgtgttcgctttctgataacagacatgctccatattcagtccctgctagatttggactaattaaatgcttttcgactaaaactctcctttgaagaggcgttaattcattcatttttaatagtccaaacttcccaaagggctctaccgctttatttataaatttctttttaaataattcttgaaccttttgagcttcctcttcgttttgcatagtagaaaattgatattgcttaaaattacgagccaaacgaattcgactacttaaaacaatatcagaatcagggccatcccccttcatccatggactaatcgcttcattcataattttgtccagtgacatagaactactccccctctctatgctcactaagctgagtttcaagccctcgaatttcatctcttacctcagcagctttctcaaactcctcattctgtacatattgtttcagaataagttttagttcatctaattctttctttaagtggatatttccttccattcgttccggaatttttccacaatgttctgtatgtccaccatgaagtcgttttaacaatgggtttaagtgtcctttaaatgtatcgtaacaagaagcacaaccaaggcgtcccacctttgtaaaatgttcgtatgtcatcttacaacctggacatcttattgtatttgtatttgaaaacccgttttttccttctccaaacattgttgattcaccgtgtaataaaccagcaaatacatcatgaaatgaaaagttagactgtgatgattgaaagaaagacgtatagccactttgctctgcacattgctcacaaagatgaacttccgccttcttctcgttgattacttttgtataatgtaaagttgctggtcttatattacagttttgacaagtcatcaatatccccacctttacaacaggaacgatctacctcatgatacttttcatacattactagattgtcctctttccttaatccatttagataaaagtacatgctctttttcaaaacttctacaatatttaactgccctatcttaattatcattcttttacaaaagctgtatttatttatatttcagtgttcttaacattgcgcataatattcgagccctaagttcatctcgagaaggaatatccattgataatacagaacgatctagtacacttaacattagttttgcttcacggcctgttatgattccctcttctaataaacgtataatcatactctctgcattcccttgtgcaacgctatgatcaatcatatgaagcatttgatcaataatgtctatatcatcatgcagtttgacttttataatgcgaatgtaacctcctccaccacgtttactttctactacaaatcctctttctaatgtaaaacgggtattgattacataattgatttgagatggtacgcactcgaatcgatccgcaatctcatttcttttgatttcaatcacattattattacttaagtcaataacttgctttagatattgctcaatgatatcagatatatttctcatttatccgccacctttattgactttgactatctttgactttaattatatacgtattaataaaatttgcaactcttttgcttattcactatcctagccacattcccctgcatttaatcaaaatagtaattatttaagcacatttttttaattactatggattataaaagaaaacacgaaaaaacacgagtcatttgactcgtgtttagttgcttggcgacgtcctactctcacagggacaaggtcccaactaccatcggcgctagagagcttaacttccgtgttcggtatgggaacgggtgtgacctctctgccatcatcaccaaactatgaaggcatattccttcaaaactagataacattgctacatattatatggttaagtcctcgatctattagtattcgtcagctccacatgtcactcacgggtttataggtaaatccctttcctaaaaaacctaactttatcatacgaggcggtgacactatgaagtatgtaaaagttagtatgaatggtggaagtgaacataaattctcaatgactttagatcggtttaaagaacttattactacagagaatgggatattagaaaataaattagtatgtattgaaaatgtaatgattaatcctactaatatatcttctgtagttgaaaaaattggtgtaccggctaagtttatggaagcttaaaatgttagataaaaaacatccattagggatgttttttaatttataaatatgataatcgtacagtaaatatttgagtagattttatagcaatgactatgcatatattaagtacctgaacatggttcttaatacatgcacgaaataataagtacaagcatatattatatagtaggacaagatcttcgtgtcctacttaatactcagaaaaaacctctaatcacataagagcatccaattgcagggtgctcttattttttatgaaaatctactacgagtcttattttatagtaggatgcaataataaagggctattttgaaatagtgttctttagtctttaatgttaaatttatctttaacgttaataaatattaaaaataatatgatagcagaaattaagttagataagtagaaattttgatgaaacagtagttcgaagatgacatagaaagtaacgaataaggcaatagcaggtagtatgcaaataaatataaatctccaattttttaagtaatgtttataattagtaagtactttctccataaatatagctcctatatttttgtttttatataattatacatttagatacaaagattttcaaagtaaaatatttagcaattcaaaaatataaggagagcttttgttgaaaatccagattgctgtagcaatctggatttgactttaaagaactatactaaaatgatacactataatctacgttatttttgaaatgaatagagggatttgtgtgatagataaaattaaaaatgctgtagaggatatgtacgaagatgaggctaaagatttacttcaaagtattctcatacagttaaacttattagaagaaaactatagtgaagatacaattaaaaatttgatggatattccgaaacaattaacgagtaatcctacttataaagggaatgtaaaagaaagtacgcacgtacatattgcttttgatgattcaacggctggttgcttaaaatatatgttaagtcaagaagaattatttgaagagagtgttgttgctttttcggaattcttttcaattggaccgatatataggttgcatacgaatgaggggcaactagtaagacagaagtggttaataaataacttaactgcttatgatagttattttgaagaagaatatttatcaagatttatagcaactatagaagaactacatactattcctgttgaaacgcctattacaatttggaaggctgataatgcacatgaacatgtaggcctaagttttgtaatggcacaattaaaggataagaaaaacattcgagttattaatacgtctgaagcaagtagagaaatattaaaacaagagtatgatattcgtggaacgggagaattaccacctgaaagtttagctctattccaaaaaagttttataaagctaccttatttaactgaagagaagcgcatgaagtttgaaaatgagtgggatagattatcggaaagcatagaatgtttaagagtttggaaagaaaatgaagtgcattctgtacaggaagattattttgatcaatttataattgaatgcgcgaaaagtgtgggtgctgatcgagagttccttaaagctcctagagtaattggtgaagcacttggtcttgttgaacagttagttggagatactttcttagaatatcgcttgaaacaattaattaaacaagaagtatttgaatttgaaggttcgttagatgaaatgcgtttttatagtgtgaagttaaggaaataataaacacattctatttttgaaaggctcgtatttttaataatacgagctttttaagttgaatttgggctatacataagcttcccagagagggcatatcacatatgaatggtaaaggtaatgaatgaaaagaaggtgatttgttaatatgtataaccaacaaaattatccatatgatcaagcgatgtattataatccacatgactacgggtatgaacctacaaatgaagtgagagatattgaacaagaagattacagaccagatgatgcagaagatgctccaacgtcaccacctccgtcacaagcgccgtcgttaccgtctacatttgcttctccagcacaaccaggtaatatgaaatcatggatgtgtaactgtctaggaagatggggctatttacgcttacatcgtcctggtcctttcggaagagatttatggttcttcccgactgaagtgagaagaaatggagtgtcaggttacacgtggcaaggtggtcgtcgtcgtaaagtaagttatcgctatcaacaaattagtaattttatgtgcttcgcataaagagaagtgggagagtgaaacgattttactctctcacttttttatttttcaatatacgaagtaagattttgattaaaaatttacaattttcacgtttttattagagtataatgcatatgttgggttgattttcaaaaacaaatgagagtgagggaatacaatgtcaatgaaaaacaaagttgggttaagcatagaggatggcattaatttagcttcagctcagtttaaagaagatgcgtatgaaatttataaagaatcgcgaaaaaaacaacctatattatttgtaaaccaagttgaaatcggtaaagaatggctcattactagatatgaagatgctctgccacttttaaaagataatcgtttaaaaaaagattggacaaatgtgttttctcaagatataaagaacatgtatctttccgttgataatagtgaccacttaacaacacatatgctaaattcagatccacctaaccacagtcgtttacgatctttagttcaaaaagcttttacaccgaagatgattgcacaattagacaaaagaattgagaaaatagcagatgatttgataagtgatatagagcgaaaaggtacattaaatcttgtggatgattattcatttccattaccgattattgtaataagtgagatgctcggtattccaaaagaagatcaagcgaaatttagaatttggtctcatgctgttattgcatcaccagaaacacctgaagaaataaaagagaccgaaaaacaactatctgagtttattacatatcttcaatatttagttgatattaaacgaaaagagccaaaagaagacttagtgagtgctttaatacttgcagagagtgaagggcataaacttagcgctcgggaactatattcaatgataatgctattaattgtagcaggacacgagacgacagtgaatttaattacaaatacggtattagcacttcttgaaaatccaaatcaattacagttattaaaagataatccaaaactaattgattcggctattgaggaaggattgcgttattattctccagttgaggttacaactgcaagatgggcagcggaaccttttcaaattcacgaccgaacaatcgaaaaaggagatatggttgtcattgccttagcttctgcaaatcgtgatgaaactgtatttgaaaacccagaagtattcgatattactcgggaaaataatcgtcatattgcctttggtcatggtagccatttctgtttaggcgctccacttgcgaggttagaagcaaagattgctattactactttgtttaatcgaatgcctgaactacaaataaaagggaatcgtgaagaaattaaatggcaaggtaactatttaatgcgttctttagaggaattgcctttaactttctagaatagttaaaaggagacatgcatacatcgaaaatgatttacatagagtatgtatgtgttatttaaattcgaaacggaagggtgaaaacatcccaatgatcaactaattctatttgtaagagatcttcgttaaaaaacgaaatattcttctgaatagggttagtctgtacatttatagaaaagggatgtatttcgctctgcgaatatatagtctttttatatgatttgtgctgcctcctgttcagaacatgaaataggaggcttttttatgtcgacaaatgtagtaacgaaacaaaacaatggggtatcacaagtattaaaaaatcggtttgttcaagggattttagcatcagcattatttttacaaataggaatatgggttcgaaactttgcggtattactatatgtaatggaaatgacaaaaggtgatgcttttgctatttcgatgatttcagttgctgaattcgctccaatttttattttttcatttattggcggtacttttgctgataggtggaagccaaagaagacaatgatatggtgtgaaacgttaagttccatttcagtattcgctgtattaattacgcttatgtttggaacgtggaaaattgtgttttttgtgacactcatctctgcaatcctttcacagttttcacaaccatctggaatgaagttgtttaaacaacatttatcaacggaacaaattcaattagcaatgtctatatatcaaacgatatttgcaatatttatggtattaggaccaatactagggacatttatctttcatagttttggaatttatatttcaatcatcataacaggtatttcgtttttacttgcggcagttgtattgttattccttccgaaagatcttgaaaacgacgtagaaaagaaggatatcactctgttgcaggagatgaaggatggtattaagtatgtcaaaaagaaaaaagcattaactttgctagggctttgttttatggctgcaggactaggtataggattaattcagccattaggtatatttattgtgactgagcagttaggattatcaaaagagagtttacagtggctactaacagtaaatggtgcgggaatgattgttggcggagcattagcaatggtatttgcgaaaaacgttgctccgcaaaagatgttaattatcggtatgcttggtcaagcaattggtattggcattataggatattctacaaatttatgggtgacacttacagcgcagctttttagtggtttagctcttccttgtatccaaattggtattaatacgcttattattcaaaatagcgataccgattttataggtcgtgtaaatggtattttaagtccgctttttaccggttcaatggtagtaacgatgagtatagctggctcattaaaagagatgttttcattaagtatgatgtatgaagggacggctttactttttataattggattattgtttattttacctatatacaatttaaagccagtaatagcggtagaaagtgaaataagtggtaaaggaagtgctatacaaaatgaatcctaatccaaatgttaaataccctattgaaggcaatcaaaacgttcaatttataaaaaatataataacaaaacctaatatacttgttggtgactattcttattatgatgcgaaagatggagaaacatttgaagatcgagtattacatcattatgaatttcttggagatcgccttactattggaaagttttgttgtattgcatctggagttaactttattatgaacggagccaatcatcggatggatggattttcggcatatccatttaatatatttggaaatgggtgggagaagtatacacctagtttgtctgatttaccttataaaggtgatacagttataggaaatgacgtttggattggtatggatacaacaattatgcccggaataaaaataggggatggtgcaatcattgcagctaaatctgttgtgactagagacgtcgcaccatatacaattgttggtggaaaccctgcaaataaaataaaagagagattttcaaatgaaataattcaagaattattgcaaattcaatggtggcattttgatattgaaaaaataactggaaatattgatgctattgtacgcggagatattgaaccattaagaaagctaaaaagggaatgaaaaatggatgacaaatagtatcatacctccgaattttgttaatgataatagaacaaggaggtgtgatactatggcacaagacgttttatgtgaagtaaacaactgtaaattttgggcgaacggtaataaatgtagtgcagaggcaatttacgtagtaagtcataaaggtaaacatgcatctacaacggaagaaacagattgcaaaacatttgatccagaagtgtaaattctttaagggtagccaaatcgtggttgcccttttattaatgatagtattgataataaatatcattttcattcattaattttagctttttttgttattttttcatattttcttcataagtgatgtaatccaactcaattcatgttcaattcgtgatttactaaattcaatgacttcagtaataaaggctgaggtaacctctagagactgaatagcggtaagttgactatgtagtacgttttgacgtacagtcaaaatctcttttctagcttcatattcaagtttttcaaatagcgcgatacgaacaagaaattctgcattatttgtcgcaagtttttcgggaaactctcgtaacatttcagaaaaaatttcttctcctgtttctgttatatcgtacatatttcggtttggttttccaacttgtttatgtatttttttcgttatagcacccatattttcaaagcgccgaagggcagggtaaagcatgttgtgatttaattcaaaattctcacctaaacgattttgaacattttttttgatttcatatccatgttttggtccggtcgttaattctgctagtagtaaaatatcaacgtacataaaaatcccccttatatatttctcaagttctctaatgaaaaatcccctttagtatatgttaaaataacatatgatagtttatacaactttgaactgccgacctatcacttttattgtaaaagaaaagggaggaaagaactatggcttcacctgaaaatgttattttagttcatgaaatttcaaagctgaaaacaaaagaagaattatggaatccatatgaatggtatcgtttgatgagggataatcacccagttcattatgatgaagagcaggatgtatggaatgtttttttatatgatgatgtaaatcgtgttttatcagattatcgcttattttcaagtagaagggagcgcagacaattctcaatccctcctttagaaactagaataaatataaactctacagatccaccagaacatcgcaatgtacgttccattgtttctaaggcatttactccaagaagtttagaacagtggaaacctcgaatacaggctatcgcagatgaacttgtacaacatatcgaaaaatgtagtgaagttaatatcgttgaacagtttgctgcacctttacctgttaccgttatttctgatttattaggagtcccaacaacagatcgtaaaaaaattaaagaatggtctgatattttatttatgccgtatagtaaagaaaagtttaatgatctggatgctgagaaagggatagcattaaatgaattcaaagcataccttctaccgattgttcaggaaaagagatatcatttaaccgatgatatcatttctgatttaattcgagctgaatatgaagacgaaagattaaccgatgaagaaattgtaaccttttcattaggtttactagcagctgggaatgaaaccactacaaatttaattattaatagcttttattgctttttagtagattcacctggaatttatgaagagttaagaaaagaacctaacttaatttcaaaagcgattgaggaagtattacgctatcgctttcctgttacattagcccggaggattacagaggatacaaatatatttggttctttaatgaaaaaggatcagatgattgttgcgtgggttagtgcagcgaatttagacgagaaaaaattttcacaagcctctcaatttaatgtacatcgaacaggaaatgaaaagcatttaacctttgggaaaggtcctcacttttgcttaggagcaccacttgcacgtttagaggctgagattgcattaactacctttataaatgcttttgaaaaaatagagctatctccatctttctgtttagaaaaatgtatattggaaaatgaacaaacattaaaatacttacctattcgattgaaagctaaataaaaatcttaacaaggtgcatacatttgcatcttgttttttgtttctcaattgtgagttttcggtaatcaccttaatatggaattgtataaaacgtagaggaggattcttatgttgacttgtaatggaagtaaatcatttcaaaagtttattaaaggtgttacagatcttatggaaaacggtttatttgaagaagaaatagtgtgtggcattgaaaagttactagaagaacttttagaaaagaaaacatggcttccgttagataaacagaaggccaatttgactcaatatgcacgacatttattgtatgaagatccgctcaaacgttttgaagtactagctctcgtatggaaagatggacaatctacacctttacatgatcatgacggcacatggggagtagaaggcgttttttcaggaaggattatggtgcagaactttatacaaacgaaacaacttggaaattcacttgtttatttaacacatacaggaaatctttatttgggagaaggagaaacagataaagtaattccaccagcggattgtcatattcttgaaattagcaaaaatgaaagcgttattacgattcatgtctatggaaaacggttagaaaagtttaaagtatatataccaactgaagaaaaaaatgtgtacatgtgtgagacaaaatacattagttataattcatagtttaaaatccaaagcttttttaaaaagaaaagctttggattttatttttaattatttcttgacctgaaacgcttttcataaattataaataagaagtacctcacgaggattgtatgaaaacgatacctaataattaattagaactcgtgtatttatagaaagtggtgaagaaataatgaaattaatcgcaattgatttagatggaactcttctttcggggaataaaatgataagtaaagaaaatgcagaagcaattcgaacatgtcaagaagctggccatgttgtagcaatttgtacaggacgttcaattgttgacattgagcgattattgttagaagttgatttagagtgtccaatcattgcggaaaatggtgctcttatatataaagataaaaaaatgatgaagagatatccaattcaaaatatgcaggcacttgaaattgtagaataccttgaagagaatggtttatattatcagctctataccgataaaggtgtgtatgtaccggattatggagtagagagtgtacgtaatgaaattgagcatgtgaagaattcaaaagaaaatttcgacttgaaagagttagaaacaatcgcagcattatatcttgagcatacagcgtttcatagtgcggaaagttgtaaaccaattgtagaaacagatatacatgtgcataaactattaccattttcttatgaaattgagaaattaaaaaaactcaaagaaacatttcttcataatacagatttagcaattacatcttcatattggcacaatttagagattaatcatcgagatgctcaaaaagggaatggattatatactttagcagaacatcttaatattccggttgaaaacactgtagcgataggtgatgggctaaacgatgtttctatgatggaaaaagcgaacatatcaattgcaatggggaatgcagtagaagaaataaaagcaatgtgtaaatacgaaacgttatcaaatgaagaacatggtgtggcacatgctttatataaatatgtaatgtaattaaaaaagaaaaaagaatccaaatggattcttttttcttttttattaggggtaaggtattctatgagattcatagaagccttattacattttattatatagaatatattggaataaatgtttatatttttcataaaaattgtgaatattttatgaactttatacttattgcatgtttataccgctattagtaacgtgtatgactctcaagtgaaaattcagtgaattgtaagaaggaattcaagttacctagacaataagtgaggaatcaacgaaatatatactaattaaaggtatattcagtatatatattcttttcttattttaattgaaaaataaaatttgttcgaataattattctacagctatataccttcactagctttcttcgtataatggagaagtatgaattttagatttgtattaattttacatattgaggtgaaaaaggaatgaattcgcggctaatggaacttattgatgtgagtacaatagaaaccatggcagaacaattttataaattaactaacatatcacatcagcttcttgatgctgaaaaagagtgtgttttttcattcggaatgaatgagataaaaaagagtaaacttccaaagattgaaatccccattttcttatacaatcaacatttaggatcttttgttgtatggtccaaaaaaagcgaaattttcagttgtcaaaaatactttgaaatgctctcaagtttaattttagatggcgcaataaaagtatttcaaagtaaaaatacaacgttgctttctcggaaagaggaggaactacatacgattttacaaaacatgcctgttatggtcgatgcgcttgattataatggagattttgttttgtggaatcgagaatgtgaaattgtaacaggttataccgctgaagaaataattggaaatcccaacgcactgcaattactgtatcctgattataattatcgccatcaaatacaaaagaaatttttaacttgtggaaaaaatttcagagattgggaaatgcacttaacatgtaaaaatggtgaaatcaaaacaataatgtggtcgaatatatcagaacagtttcctgtaacaggatatagttattgggctgttggtgtagatattacacatttaaaagcgatagaagagcagttaaaacaacaaacatctgaactggaattaatttttaaagctttaccagatttatgtttcttaacagaagatgatggcacaattatagattacaaggcaggatctcctacaaagttttacgtacccgcagaagcttttatgggaaaaaagttttacgaagtattaccatcttcagtagcacagcagtttcaggaagccattaatcaagtgaaggaaaaaggaacgaatgtaattgtagaatatccactcacacttaatggaagtattaatttctttgaggctaggtgcttaccattattacatgataaaattatgattattgtacgcgacattacagagagaaaaaagacagaagaattgctaaataaatcagatacgcttgcagcaattggtcaattagcagctggcgtggctcatgaagtaagaaatcctttaactgtaattaaaggttttatacagttatttcaaattaataaagaagatcaagaaaaatattttgatcttatgctctctgaaattgaaaggatagaagcgatcctgcaagaatttctggcaattgctaaaacagatgagataaatacagaaaagaaaaatatttatcaaatttttaaaaatgtcgtatcgttaatgaatacaaaagcaattatgacaaatattcaagttgaactatttacggatgacaaagatataattattgaatgctcagaaaatcaattgaaacaagtatttattaatattttgcaaaattcaatcgaagctatgccaaatggtggggaaatttcaattcacataaaagaaataaatgatgatggtgtcatcattcatgtaatagatgaaggaataggaatacctgaagaaagaattaagagattaggtgaacctttttatagtacgaaagaaaaagggactggtattggattaatgttaagttataaaattattgaaagtcatcaagggacaattagtatcatgagcgaggttggtgtcgggacaacagtaactatttacttaccgaaagtactaagtaaacaatctctttctaattgtgacgacaaatgtatagcaatacgcactagtagtaattcttaaatcaattaatacccaataacaaagcgattagtgaaaactaagctttttgttattgggtattttttatatttaatttagtaaactttaccttttctttacctttgttttaatttctattaagttttaaacattatattaatatttgtacaaagcaatgtatagaaattgtacattacttttaatatagaaatgtgattattatttgaaatattgtaaggaggagattatgacaaggtgaaaaagcaagagaagaaaagtggtagagtagtacctctccggttaaatattttattcctttgtgtatttttattattttctggcattattattcagttagggaaagtgcaaatttttgatggagaaacatataaaaatgaagtagagaagagagaaaatgcaaccgtgggcctttctgtaccacgtgggaaaatatttgatcgtgaaggaaatccagtagttgataataagtctttacgtacgattacatatacaaaggtgaaaggtgtaaaacaagaagaaatattaaaatcagcaagacaacttgcagatattattgaaatgccacaagaagatatagataagttaacggagactgataagaaagacttttggatgcaattaaatccagaacttgctcaagacttagtatcaaaaaaagaaatagataagttccgagataaggatattaccggaaaagagctagacaaaaaaatagaagatttaaaaaggaaacgcgttacagataaaaatcttcaagaactaacggctaaagatatagaagtgttagctattaaaagtaaaatgacctcaggttttcaaatggcacctcaaattattaaaaaggacgttagtgaacaggaatatgcggtgattagtgaaaatttagcgaaccttccaggagtagacgcatcagttgattgggagagaatctatgtaaatgatggattattccgttctgtccttggtaacgtctcaaatgctgatgaaggattgccacgtgaacgattagattattatttagtgcgtgattatagccgaaatgatagggtcggcaaaagttatatcgaacagcaatacgaagatgtacttcatggtacaaaaaaagaagtaagaagcattgctgataaacaaggaaatactattagaacggaaacggtttcggaaggaaaaagcggtaaaaatttaactttaacaatagatatggaattgcaaaaaaaagtagaggagagcatagaaaaaatattaaaacaatataaagggtcagaatcaatgttagaccgtgctttcgtagtgatgatgaatcctaaaaatggccaagtattatcaatggctgggaaaagacttgtagaaaaagatgggaaaatggaagtagaagattatgctttaggcacgctgacaagttcatatgagcttggatcaacggttaaaggtgcaacagtgttaacagggtttgaaacaaatgcaataactcctggaacacatttttatgatgcacctatgaagtttaaaggaactaaggaaaagaagtcttggaaaaattttggtgatatagacgatctaagagcgttacaagtttcttcaaacgtttatatgtttaatatcgcattaaaaattgctggtgtggattatgtgaaaaatagttcactagatattaaacaagaatattttgataaaatgagatattatttcaggcaatttggactaggcgtacaaactggtattgatttaccgaatgagactgcagggcaaattggaagaaaagataatcagcctggtttcttattagattattctattggacaatatgatacatatacaccacttcagcttgcacaatatatttcgactatcgcaaatggagggtatcgaatgaaaccacaaattgttcaagagattagagaacaaaccgttcaaaaagatgaggttggtaaagtagtacaatcaatagaacccgttgttttaaatagaatcgatatgaaacaagaacatattaatcaagtaaaagaaggatttagaaaagtatttcaagaaggagatggaacaggagtaagagcgttccaaaaagcaccatataaaccagctggtaaaacagggaccgcacaaactgtatatggtggagaaaatgaaattgggcgaaatgcgaaaggcgatcgtagagaatgttataacttaacattagctggatatgcgccatatgatgatccagaagtagcattttctgttgtagtaccgtgggttgaaaatgataaatcgggcattaactccgatattggaaaagaagttttagatgcttattttgatttgaaaaataagcgagtaactggtgaagcgccaaaaacagatgcctctaaagagaattaaaatgtacgaaacgtctctagcatgtctgtaaactagaggcgtttttatctgggaatagattagaaatgaggtgtatatgaagctgtttattctaaaatattggaggaacatatgtagttacatattaattataataggggttatttttattaataagtcctttttattttgtatggtagaagggatttcgatgcaacctactttgaatgaaaaagattatatacttgttaataaggtaaacgtctgtttatcgtcttttcatcatggagatgttgtcattataaaaaaagaagacgagcctacttactatgtgaaacgaattattggattatcgggggataatatacaactaaaaaaggatgaggtatttattaacggtaaaaagcgtgatgagtcgtatatacatttagatatgtcacaagtatccaatcgtttttcaaattttagagaaataaaagttcctacgcataaattatttgtgttaggtgataatcgtaatcatagtaaagatagtaggaatacacttggacttattgatgagtcaaatataataggtaaagtagaaatggtattttatccatttgatcatataaaatggataaaataattctattaactattcacgttttataaaatcaatcatatattaatagcataggacaagcagaaaagcttgttctaacctcacagaacactccttatcacggttaggcatctacataggtagatgcttttttttatgttgatgactgaaaattatttatcaatataatgtagcaagcatattaggactattaggggaagattacttgtacaaataacagtatgcttaattaaaacaatgaaatgtaaggagtgaggaataagtgctaaatattttagtggttaattttccagcagagggacatgtaaatcctacattaaatttagtaaaagcctttactgaacgaggagataatgtacattatattacaacggcaaactttaaggatagaattgaagatttaggagctactgtacatactcatccggatctattaaaagagatttctattgatgctgaaacctcatctgggttaaatgctttttttcatgtgcatgttcaaacttctttatatatattagaaattacgaaacaattatgtgaaagtataaattttgatttcgtaatttatgatatatttggcgcaggagagttagtaaaagagtatttacaagttccaagtgtagtgtcctcacctatatttttaattccgccagaatttttgaagacattaccttttcatccaaatgcagatatgccattccaaccagaggaaatctctgaaaaattactaaatcagatggaacataaatttggagtaaaaccaaagaataatcttcaatttatgaataataagggtgatgtttgtctcgtatacacaagtcgctatttccaacctaataacgaatcgttcggagaaaataacatttttattggaccgagtatttcaaagcgtaaaacaaatataaagtttccactggaatcacttaaagaaaagaaagttatttatatttcaatgggaacactgcttgaaggactcgaaccattctttaatacttgtattgatactttttcagattttgatgggatagttgtaatggcaattggtgatagaaatgatatttctaaaattaagaaagcaccagataattttataattgctccatacgtacctcaatcagaaatattaaatgaagcagatgtttttattacacatggtggtatgaatagcgtacacgatgccattcattataatgtcccatttgtaataataccgcatgataaagaccagccaatgatagcgcaaagattaactgagcttgaagcggcacatagactattgaaagaacatgttaatgtgcacactttaaaagaggccgtaacagatgttctttcaaatgaaaagtataaacatggtataagaaaacttaatgatagctttttaaaatgtggtggttcaaaagaagcaattgcagttattgaatctcttttaaataaagtaaaattttaatcagtagggattttactacccataaatagcgggataaatagtcgtaactgtatacaagcatagaggttctcacctttatgcttgtatattcttatccagcaaattgcacagcagtatttgcgtgtaaaaaagcagtatcaaaaacgggaacagtaagatcattttgggagataagtaaaggtatttcagtacagcctaataatataccttcagcgccgttttgaattaatgattttgtaatttgtaataacttttctttagatgtttctgaaatgatccctctacttaattcatctaatatgacatggtggataaaggttctttcctcttcatttgggataattgtctcaatgttatatttcgctaatcgtgatttatagaaatcttgctccatcgtttgttttgttcctaatagtccgatacgttttatactctgttctaccatttctttagcacttacatcaccaatgtgaagaagcgggatagatattgcttgttctacttcttcggcaaatagatgtacggtatttgaacacattaataaacattcagccccagatttttcaactttctttgcaactgtaactagttcatttttcacttcttcatattgatggttttgtaataaagtagttacttcaccaaagtccatactatataaaactaactttgcattttgatcgtattgagagagtgtaagtgtattaatatgtttatagtataatgatgtagattcccaacttaatcctccaatcaaaccaataactttcataatgcattcctcccgaaacgattttgaatttattatttcacaattccgataagaatacaatgatttaaatgatctatttaataaaaaataaaaatagtgagaaaagtattgaaatttatactttttagtgccataatacgaattacaaattaatacttatccagagaggtggagggaacggccctaagaaacctcagcaacccctatgcaattttataggaaggtgctaattccgcagaggacacgatgtgttttttgaaagataagaggattcttgaatgtgaaagaaaatgacctcttatgtaagaggtcatttttttgttgtatagaaagggagtgtcgatgcataattcatttttaaattaaatatagagtaataaaagttgactaatatgagaggggaattgtcatgaacaaattatcaacaaagttagtagtagcaatcggtattggagcagcattatacgggatattaggactttggggattttccattgcaccgaatacatttattaaaccagcattagctatattaactgtttttggagcattatttggtccagtggcaggactgttaatcggacttatcggtcataccgtaacagatacgattgctggctggggtatttggtggggctgggttattagttcaggtattattggtttttcaatggggcttattcaaaaaagagttggttttagtgtgaaaaacgggtcatttaacaagggggatatttcttatttagcaattactgggctagttggtattgtcattgctattatatttgctggggcattcgatattattgtgatgggagaaccatttgacaaaattgttatacaagtattaggagcaacaatttccgatgtcatcgttttcttagtacttggattgccacttacaattggtttggcgaaatccaataagaaacatacacatttaaaaattgaaaagtagggatgttaacatgcaaccaattatttcgtttgaacaattcacctttcaatatgggcatgctgtgcagcctactttaagtgatattacctttcatatataccctggggaaaaagtgctaattgctggacgaagtggctcaggaaagtcgacattagctcattgtataaatgggctaatcccattttcttacgaagggaatagtacaggtaacgttttaattgccggtaaagatccgagggaaggaagtatttttgaacaaagtaaacaggtaggaacaattttgcaagatcaagatgctcaatttattggtctgacagtagaggaagatgtagctttttatttagaaaatgaatgtgtaaagcaagatgacatgaaaaagattgtttcggactcattaagaaaggtgaagatgcatacgtttcataaacaaagtccatatgaattatcaggaggtcaaaagcaaacagtttctctagcgggtttattaacaacaaatgcggatatattattgttcgatgaaccgttagctaatttagatccactaagcgccttacatacgataaaacttatgaaagatatacatgaacaatataataaaacgattgttattatcgaacatagaatagaagaaattttaaacctggatttagacaaagttatattaattgatgaaggtaaagtcattgcgataggaacaccaaaagaaatcttagcgtcaaatatattaccacgtatcggcttaagagagcctatttacatcgaagcattaaagagattacattttgatagtaataatgacgtaatatatccaatggaaaaccttcaaaaagaaaaggtaagcaacgttataaaagagtggatggagaaacaagtcatattaaaagggaatactaaaaacaaggaattacttaaagtggagaatttatcattttcatactctaataaacaaaaagtattagaaaatgtaaacctttcaatatatgaaggagaaattgtggcactgttaggacataatggagcagggaaatcaacattagctcatagtcttataggcataaacaaaatgaaaaatgggaaaatcttgttaaaaggtgaagatattagttcttggtctattcgtaaacgtggggaaatcatatcttacgtgatgcaaaatccaaatcatatgattacacagcctactgtttttgaagaagtttcatttacattaacattacataatttttctaaggaagaaattaagaatagagtagaaggaactttaaaaatttgtggtttatatccatttcgtaattggccaattcaagcactaagctatgggcaaaaaaagagattaacaatcgcatctgtattaacaacaaatcctaaacttatcatattagatgaaccgacagcgggacaagattattatcactataaacaatttatgtcttttattaaaaacctagctaaaaagggaatttcatttgtttttatcactcacgatatgaatctcgcgctagaatatacagaccgtgcagtagttctacatgaagggaaaattattgcggataatacagtgtttgatgtattaggcgatcaagaaacgttacaaagagccaacttaagagagagttctttaaccaagcttgttaaatttagtgggattgcatgtccagaaaaatttatggagctttatttagacagtaataggagggaggaaggtgcatagtacatattttcatcgtatggatgggatagtgaaattgtttttatttattttttgtatgacgcttacttttttgttttttgattttcgggtgttgctaatattatttattattgggtgtatcgggctcagcattgctaaaattccatttcgtaaaattttaattgtttttagtgtcatatttacatttagtttattaaactctgtcatgattttattgattacaccaactcatggatctgaattaactgaatcatataccgcgtttttacatgttggatatgcaacgattacatatgaaacattattttatgcagctacactttcattaaagtattttacgttattaccatttacacttctttttatttacacgacagatccaagcgaatttgtaagtagcttaagtaaacttggtattcattataagattacttatgcaataaatattgcactacgttatattcctgacatccagtctgagtataaaattattaaacacgcgcaagaagcgagaggagtggcttttgaaaaaggagaagcaagtttatgggttcgtatgaagaaccgtgttttaattttctggccactaatcattcattctctagaaagaatagatacggtttcaaatgcaatggatttaagaggatttggaaagaaggataaacgtacatggttttatacaagtaaggcgaaacgtgaagatttcatcgctttatttgccggtattttcatatttattgttgcggtatatttaaaattaaacgtatttcaaaacttttggtatccattttaaagcactctttaaacgagtgcttttacttatttttatgtagacatgctcaaaaaagggatatatacataatgtataatacgaaccagttaaaatgatcaactacctattagttttcaaaccaaaaggaggagaaaatatgagttacggtggttcttgtggttttggtggaggttttgctttactagttgtgttattcattctattaataattgtaggatgcagctgctggggcggaggatactaatttttaattagtcttcacaaatgtaaactaaaaaaacattgaagatacttatgtatcgaaacaaataaaaaaggagcgactatgctccttttttatttgttttaatgcgtattcttattatatttcgggaacgtaatcgttaaagtcgttcctttactaacgatacttcgaatttttaaacttccatgcatcgtctcaataatcttaacagcaaccatcgtacctaaaccggttccttttgtttttgtactaaaatacggttcaccgaatcgatgtatttgctcctgtgacattccaactccgctatcttcaattcgtatttcaactttactattattgatagatgaggaaatatttaaggtaccaccattaggcattgcttcaatactgttctttattaagtttaaaaaacattgttgaaagtgctgtttattaccaacaatggttgcctcagaaaaatcctgtgtaatatgtatcgtattcatattacacaatggcaatatcatattaataacccgatttaactcttgttttattgaaatttgatctaatttttctggagcaggtttggcaaacgttaaataatcatcgataatttcttgggcacgatttaactcttcaagtatatgtttaatatattcgtctcttgactcaggagttaaatttggtgtttttaaaagctgtgtaaatccttttacaaccgttaagggattccttacttcgtgcgatatacttgcagcgagttggctaacaatctccattttttccattttaattaattttgagcgcattaatacagcatcttttataacttcatttatataaacaataaataacatcaaagtagtcggtaataccatgaaataaataatatacaaattattcacttcaaaatctgataaagttaatacaattaaagttgtaaatatggctaggaaaaaggttaaaaacatggaaaaagctactttaagttttctattatatgtattaaattttgaagatgcgagtgctgtaacgatgaacattattccgtaaacaacaacggtcagcatgttaaagccataaaataaaaatcttgtaattaataaaattgtaaacaatatgataccgacagggaatccaccataaagcgtacctattatgaccggaatttgtcttaaatcatgaatacaactttcatccatatagatagggtatcgcatacataaaataagcgggatactagaacaaagggtaatcagtagtattttatatttctttaaatagcgcccgctatcatatatgaaataaaaaacaaatatactacataaaatgtatagaagattatttaatacgttttgattaatataaacaaagtccataatatttgcctcgttattctgaatttacttaacatatgtattatacataataacatatgttaaggtgaataaaccttgttaatacaagatttgtttggctttttgttataaaatgcaaacatttttcaaacgttagctatccaaagatacttttactaaaattttttactccttcttcctgcatgttcggtaaaacatgagaataaatcctaagagttaatgaaatgtctgtatgacctaatctctcactgataattttaggattaactccttgtttcaatagtatagttgcgtgtggatgtcttaaattacgaattttaatttttttcactgctgcattttttatttccttataaaacttttccctgaaagcatttctgcataaccccccacctgatttattacaattaattaaatctaaatcttgataagcagaactgattggtaataagaaacgtttgcatgagattctaaataaatataaaaatactaaaggaaagtaaggtatgaaaaaacaggtgtttcaagaaaagtggacgagctaggtcgtgtagtaattccagtaagagtttatttgggaggtggcttttaaaactgatgttgttgagtacatgtggtagtaaaaggtagatggacatatgaaaaaagtagaaattgatgttagtagcaacaaacttttaatagtgcaggacgggaatgtgacagtagtcaatccaccaatgagcggatttggtgagcaagtcgcggtttagataaacggtaaggttgatcgtgtagatactaagtttactgaaaagataaaatgattatttttagaaagatacccagacggatttagtcgagaagctagtcaaaatcgcgtagatgtgaagtgaaaatcgtaaaaaaaaagagtcatgagtggaaaggctcatagctctttgaataagggtaatggttttataggtgaatattattattaaattctaaaaaattcaatgttagtaaattaattggtatgtgatttgagttttatagaaagagatcagctaacaacagctagctgatctgcaggttctgtaagacaaaacagaaaagaatattaacagaatatagaggtttattctggttgtttgaacgtagttaaagaaagaatatcacatactatcaattttaataaaaactatctgtggctttcacttctttattttattcacaaatagttccagtagctattccggttggagcgacacctactgggacattagtgataacagtattcgtagcaatatcaataacggaaacagtattactagcttgatttgtaacatatgctcgagtgccatcaggtatgatggctacttgatcaggggataaaccaacagaaattgtatcaatcacagtatttgtcgccacatttattaccgatacattattgctaactttatttacaacgtaaataaggtttccacccggtgtaatatctatgccaacaggttcggtacctacgttaattgtattaataactgcattggtagcggtgttaataacagaaaccgtattgctgttttgattcgtgacatacgcacgagtaccatctagtgtaaacacgattattctaggacgaatgccaacagggatggtatcaataactgtgttggtagcagtattaatgacagaaattgtgttgcttaattcgtttgcaacatatgcaagggcaccatttggggaaacagtaattccttgtggagcgatgccaacaggaatggtattaataactgtgtttgttgccgcattaatgacagaaacagtattattgccatgatttccaacataaacagttgtgttatttggagaaacagctacacctattgggttagttccaacaggaatggtagcgataacggcattagtagcagtatcaataacggaaacggtattagaaaaaatattagtaacataggcacgagctccatttggtgaaacggttacttcaagtggtgcattacctacagtaattgtatcaactactatatttgttccggtgttaattacagatactgtatcatttgtagggtcatctatgagtcctgcatttgtagcatatactaggaaattacatgcaggtccggttggcccggtaggtccggtaggtccagtcggtcccggtggacaatcacaatctccattaggtcctggtggtccttcaggtccttgaataccttgcacaccttgaggtccagtaggtcccggtggtccttccggcccttgaatacctgacacaccttgaggtccagtggttcccggtggtccttccggcccttgaatacctggcacaccctgaggtccagtggatccttccggcccttccggtccttgaattccttgtacaccttgaggtccagtgggtcccggtggtccgggaattcccattccggtccctgaaccagtaggtcccggtggtcccggaggcccttgaatcccttgtacgccttgaagtccttgaggtcccggtggtccttccggcccctgaatccctggcacgccttgagatccttccggtccttccggcccttccggtccctgaatcccttgcacaccttgaggtccttccggtccttctggtccttccggcccctgaattccttgcacaccttgagaaccctgagcgcctctaggtccaggaaatcctctaggtccagtggctccagtcggccccggtattccgatgttacttaatagcgaactatttaagattccttgtaaaattaagttgaatgtttgctgtaataaggggtccgatatatttgaacaacttataagtgaagacaagctttggaatagaaattggaataatgctgagatttgagtgagggatgcagtaggtaaggaattaattaattgatttatagttcttataactaaatttctatttggtgtatttggttgtactgttattaataaatcatttaatgcctgtaatgctgattggagtatttgtatagttgttggatttggtgttgtgaaaaaagaaaggatggcttgatttaattgatttattatttgtaataattcttgttgttgagaattcgagaaaaaaacaggtgtacagcaattactttgatcacaaggggatatagaaataaagcagggttgctgaaatttatcacacggatttttggaatttgattttcgattatatctcataaatacctccttttaaaaattgaatattaagtaatttttggtaaattattagcaactgactttgtaggtatatgtttaatgtgaaatgttttttccttcaaagtatatgccaataaaatagaggtgttcatatgggatatataaccaatacttggttgttaggaggatgttgtaatcataggaaagaaaatgaaggttacaaagtttataggcaagcgattgtattttaaaaaagcgttattgtaataaaatttgaagtttattaaaaagaaggaatgaaggaagatgtaaaagattttgaaagatccataaaaagaattcagtaaaacactgaattcttttacacgtatttttatttgttaatccatttagaaataataggaatttgttgtgcctattaaaatatgtactgttggtaattataacatgaaaatggattgtaatagaataatgcataaaaaagaacaagtaataaattaaacaaaagctttattttattatagataaataggtgactcagcaattgtgctagccgagtcacctagtactatggaaccaaataatgttctttttctatatgtagttatgtggagttcttagaggctagcccaatagacagttaagggataaataaaatcattttagagagttttacattttattatgttaatgctacaacagcaagagttaagcccaatgtatttaatgtattagaatatggtcctacattaacagtaagagtacttgttatacctaaaggtgtagtgaaaatagcgggtgctgatacagaagtgaatcctgcagtatatcccagagaagtaccagagccaatgattggattattattaagatacatagtgatacctgccgaattacctcctggttgaatgataacttgcacttcatagattgccaaataggttcttccaccttcaagtaaaacagttgttggtggtgtgaatgagattgccgtaccattagaatttaccacggtatctagtggaatcgcagaatttacagagactattgatggggtagtttgaacaacatttaaactgttagccgtgggggatggacaagtgcaaggtttgtgaatgttagggttattatcattttggtaattcacaaataatcaagctcctttgcgtaagataattttttatcctatataaaacgtagcttttttgtatctaagttatttttaaagagaagttgaatattgttggtcagttaacttttaaaagcatttgatactctgggatttaaaagtgcatctgataaatatatatgaatgttttttaaggacattactgtaagtttggaaacataataaaatcgttatttgaaactgttcatgaaaaaagagcaccatcgaaagtgctcttagaaaatacattttatattctgttttgagctacgattttaatattctctggtggaatgatatcttgaattttttcttttaaatctacttggaccatttcttcaagatgttcaagtgaaacttcaaagtttatacattccgcagatgcgatgcttaataaagaataattttcattctttttaacgacaagatattgcgattgatctgttattactatacacccttgttgaatgcctaatttacgatcgtcttcaaaagtcataaatgtttctccttttatatgtattgccgataaatagtttactacataaatacattggctcatattgagaaaccttacattagtattacaatttcatacggtttctgaatatcttatgggctagtaatacggagagtgtaagaaggttcaattgaatatttaacaaaatccttatttgaaaacaagaagccctagagttagggctctagggcttcttgttttggtattctcacatggtttttcaaaaagaatagaacatattgaagataacatgtgaatgtttcataaatgtatcaaacaagtgaacaaaattgttattgtagaagtagtagaaatgaagtttctattagttaagtgcgtaaaaggtattatttccagtagataaaatgcgcatggggcacctaatcattattataccagaggaaaagaatatgttatgaacttcggtgaatgaaaaaatgaatatttcactttaagcgaagttaatgaaaataaaaacttcattttagtaggtgaggaggatgaatgatggttgtagaagcaaaggtgaaatttgaattagatgaagaacaaaaattacagtttcaaaatataagagaaaatgaaggggaacaagaagcgttttactttctagaagaattgataatgaaagagattaatttagctgaatttttggagatggagtataaggataaagaatagcatttcagtcaaatcaaaagggggaacctgtgatggaagtagtggaaatcgaaggccagttatcaatatttgatataggttaaacaaaatttaaactgtacgaagtcttagaagcgaaatacctagaacatcataacaaatatagttgactatgtttgtcaaattttgttggattctttagaaaagtagtattgcagagagaaacacaatgatttggaaaagattattatacgggacttattaagagaatgtaggaattgataaagcttaacaaaatagttattttgcataaaaaaacaggagtgcgtgaccaaagcactccatgtcgctaatgacaacacctataaaagtatatgaatgattttcataaatatgttgttaaaacttgaaacaaaatagttagttatttgaatagaaagagattcaagaattataaggtgaaaagcgtcatgtattatccattgtaattaaatattcatagtatgaaagatggaagacaaaatatttaaaggatgaggtgaatataggatgttttttgattttttttataataaaacgcaaatgcgccctttaggaggatcggggcctgcacaaagtactattcaagcagttcatcaggctatacaagcacaacaacaagcgctgcaatcacagcacacgcaacaaagttataccccagcacaatcatattattctttacaaccttataccccagcacaatcatattattctttacaaccttataccccagcacaatcatattattctttacaaccttataccccagcacaatcatattattctttacaaccttataccccagcacaatcatattattctttacaaccttataccccagcacaatcatattattctttacaaccttattacccagcacaatcgtattacccaatgtagattatccagaatagaatattctttttattgatttcgtatgaaactatatatttttatagtaataaaaataataaagtggatttaaataaaaaagggtacacatataagtgtgcatttagattaacaggattgaacgtatggactggattgccctatacaatatgcttgtctaattagaaggtgaagtttttttataatatcaacggaaaatcaacaaaaacgctatagtagtaaataaataaaaaaggacctgctgtgggagaacaggtccgttacaaaaatgcctatgaggaaaatcaatgtcaccaatatagtatcaataaacgagaattcatttcaggtgctaagtattgagaaataaaaaatatttggcgcaacaaagtggtcaactttattagctaaccacctgttacacaaaagaaaattaggccctgcaagttaggatgtgtaacttaaagttacagttatagtgtaagccagatttgaaatgttatacgaaagttattttgataaaaacctcattttgtagaaataaggaaaataaaaaaagtactatgcataagtgctctttaagaaaggaggtaactctttaagcggaacgttcaggttagaaatatatgatgtgaaaaggaaatgagaacaaaatttcattttagatttaatacaaaagagcagctagcaaaagctaaccgctcttcagaaaaacattaagaaggaagttcagaactcaagtgtatttatagtatggacataatttgaaggtctattcagaaaaaaattataaagagcaaccactcaggttgctctacagataggagataactcagtgaacaaaatgaacacgttaaaaatgtatgtaacaaatagaaaaataagaacaaaaaagcagctagcaaaagctaactgccctggtgaataagaagaacacaatggtcattcgtattcaaccttggtgtacttatattgttaacactttttagaaatttattcaataaaagagcagctagcaagagctaactgctcgactctcgaccaagagagctagagtgggaagaatttaaagctgactttttaaagtcgtatatagtatcggtgaaatttagagatttattcgtgtaaagcataaaaagagcagctagtaaaagctagctgctaagccttcgggtatgaaggggaatcagaaactgtatatacattattaacggaatgttgtgttttattcagtagtagcctaatttgctactacttgatcttgatctgcaacatcagaatcaaatgtattcgttgcactaacaccattaaaattattaacgataaaagcggcattggaaccgcccgagccattataagattttgtatttgcttttggagaaacgttataaaaatcacctaagttgaaagaaccgttactggtttgtaagacaaggtttccaagaatagctggcatagctttcacctactttcttagggagtatttaaattagtatatggtgtatgtgtctagaggttcatttgaaacggagaattttgaaatgaagtttgattgaaaactcaataaaataatcacttgaatagaaagcgagttaaaagaatagaaaaagaacgcccaggaaagcgttccttgatcaagactcatatcgaaaaaacgaaaatgtgacagcgatatatattatttaagttttgagtgtatgtgcaagtttaaaacaaaatccttatttgaacagaaaaaaagaccgcatgggaaagcgctctttgaccaagatatattaaaaagtatcggcaattaaattttatgtatattttcagtttatgtgcaagtctgaataaaatctttattttatcaatttataggttgatacagttccccaaacgaaaagaaccaagtaaaaaagtctttgtagtagacctgcaggtaaggggaaaagaaaaacaagtgagataaggatagttattactattaagcttagtaaacagaaatatgtccattttctagtttttttaagattcttagcaaaaataaatagtcctggaaataccgtaagcatgcctatccaaactagaatggaatgtccaattaggtttacatctgcaggaattaatcctgaaactatagtagagattcctattataagtataaaaaatgttgctattctattaattcttgttttttctagatgttgtgaaatatatagtactccaatacaaaatgttattccattaacaataaagagtatattcatcccaaaatgattaggggagcatatttcatacggagctatttcgtaggtgaattctccgcaggttgttacacctagatcactcattgcatgatgcaaatagttataaggtgctgtagaagtgaaaataaagaaaggttcaattaaaaagtatagacaagttgcaatccagctaaataagccaattttatttgatatatacattagatacctcctttgaaaaaagtatatttccattataggtggttacatcatcaaaagtaaaaattttcaagttgaaagtcgataactctgttcaataacataggattttctagaaaaatgtgattagcggaaagacgtataaaaaatggatggggcagaacctaacaaaatagttatttgaattagttttattaataaaaagagcacacttgtatatgtgctctcaataaggtagatgaatgtctcatgaaacagaaaaatcccaaaagttgtaatcagattttcatgagtaaatttttaatattgtattccttatgtgaatttatggagcctgtcattaaagaaacgatacgagttggagttttaacccaaacgatatttcataataagcgaaaaggagcacacatataagcatgctctttaataagaaaggtagatctctatgagcgcagagactacatacaatatccatatgtttgtttcttttaaatgtgaagaaaaaatcaacaaaaggtcaatgtaaactcaataaaaattcaacaaaaacgctattttattagactgcgagatggtgatatgagtcttacttttatagagatatttgtaggtcgtgagagtagtaccttcacgacctacaatatccctaattcctttaatggcgtttctagttattttaataaaatttcatgttctggttctaaatggattagtatgtgagcacgattaaattgtttcttaatatttttctctatccgatcacataattcatgggcagtttcaatgttatagtgagatgaaacgacaagatgaaaatctatgtattcagttggaccagaacgtcttgaacgaaaatcatgaaactcaatatattcatctctataagattctataatttttatgattttttgttcctctactggtaataaacgtgcatcaattaatgggggaaaggacttcttcattaattcgaaggcttcagtcatgatataaacagctaaaataattccaatgattgggtctaggaaataccattctgttatactaactaaaagtaagctgattgcaacacctaaagaagtgtatacatcagtgagtaaatgtagtgcattagatttcattgcaatagaatttgttttttcagcagttctgttaacaattcgtgatactacaaaattgatgagtgctccaatcaacataacaactattcctaaaaatgggagatgaatgggttcggggtgtatcaatttaagggtacattcataaataatccaaaaaccagctataaaaattaataatgtttcgattgttccagaaatattttctacttttccatgtccatagggatgtaatttatccgccggtttatttgaaattcggacagaaaagaaagcgatgattgaagctaataaatctaaagaggaatgaattgcttcggaaagaatagctactgaaccagtaaaaataccaataacaacttttaaaatgacgataaaagtgttacttaatactgacgaaaaagctacttttgatgaattcattgttacatatcccccctaccttttattaattattttttatgttatcagttcaatatacagtgggtctatagcaatctttttgcaaaagacaataaaaattgaaaaggtttcaatatgtttcccgtgggcatatttaattgttaaccaaaaaattgaaatataagttaataaaatgaattaaagacagggaataagaggtgcctagtgcttttgataagttatcttcggtgcaaaactaaaagcagctagcaaaagctagctgctaagccttcgggtatgaagggaaatcagaaactgtatatacattattaacggtatattgggttttattcaggtgtagagggaaataaataaatttaggctgttccaacttggctttggtcggcaacatcagaatcaaatgtgtttgttgcactaacaccgttaaatgtattaagaacaaaagcgacattagatgaacccgaaccattataagcttttgtattttcttttggagaaacgttataaaaatcacctaagttgaaagaaccgttactattttgtacaaccatatttccgacaatagatggcatagctttcaccttctttcttagggagtatttatattagtatatggtgtatgtgtctagaggttcatttaagtttgaaaattcaaagatatagcttgtgaaaaacttaataaaataatccttttgtttatagaaaaacaagctaccacgtttcattgattgtgaatcttttctaaggtgtgcttaaggggatgggaataaaaagaatattttcgagaggaaagggattaatttatgttaggaaattagtttgataaattaaaagaacctaaatgtatacatagatataaacttaataaaagttatgacaatgaagattttagaactggtaagatggggatagttagttattataaatgtgaaaagtgtgggaaagagaaggaaatcagcaaatatactaatgatgttaatagtgactattgggatgtttaaaataacattcgaatatagtccggctagaaaactagagaacaccaattcattaaagtagcaattaaagctgttttaggaataggtgtcctttttatttcgttttaaaattagaacacaataatatgaaatgctcataaaatcattcttgctatacatgataatagtataaactctatatttcttttaataatttagggttatatcttttctgcatcagccgcttttaaccacgcttcgtagaattctgtaactgatgcataccgttctgcccgattgtcatttacagcacgatacgctacctcatataattccttacttgcttcccattttataaaagaacgatctttttcaccgcctaagagtgagaaagccattgctcccatattaaatacatttgttctttcatcaattatagcgtttagttcaaattcctctggtgacataaaacgggaggaaccccatagccggcccattttatttatgtaaggtttcttactgtataaatctatatcacaaatttttgtttcgtttgtattaaaattatataaaatactaccgtcataaaaatctatcgctacataatttttcttttctacataagtatggaaagaaaaaatggaatgtaaagaatgaattcgttctataacaggtaaatgtctaaatttataaaatggagagtttggatttttatatttctcaggaggtgggaagcgccaatgcgaatgaagacattcaccatcaaaccaatcgaaaattaatacatatccagattgaactggaaaatgatcaattaatcttatgagcgattcatgctttaaatcttcataaatagtaactgaattttttagcctttcaatagcatcacccgttgttccttcatatgcaattgtttgtgctcctgcgtatttgataaatttcttatgcccatttttttctacaccaaaacttatattacctgaatcttgctggtcaaaaactgcaaatacggtacctaatttaataagccaatcaaaattatgatgttcttttaattggaatattacactatttaactgaacttcgacggaattatctttcatagattacctcacatttaatataattaagttgtacattccactattcgacatattttgtggaaatcctatgctaacaacataaaattttataaatataatgataaacacttatagagaggtgagtacaatggaccaacaaattgttattaaaccgtatcaaaaagactgggttgaagagtatataaaagaagaagagaagttctgttccttgttaggacaagaaataatcgctgttgaacatatagggagcacagcagtagaaggattaggagctaaacctcttattgatatgatgattggcgtaacagacttacaaattactgaaaactggattgagattctatcggaaattggatatgagtatgttccaaaagatgcaaccaattggcgtttttttagaaagggaaaatggagagcaggtactcatcatttgcatgtttatatttataatagtgacgagtggagaaacaatattttatttcgcgactttctaataagccataaatgggcacgtaaagaatatagagaattaaaagagaggcttgctattacatatgcttttgatcgtgtttcatatacaaaggcaaaagcgccgtttattcaaaacataataaagttagctgaaaaaaatcaataatagttgtcagtgatattgaaattctcattttattttaatctttctctcattttattttcttttttatttgatagactgcttgttacaaagcctttattagtaaggagattaaataaaatggagaagatattaagaaataaatatttccatgtgtgtgttaaaattataggtattactattattatttgtagtgtagagatgctatttattaatgttatgtacggcaatgttctgaatgtaaaatggttaaataaaaaattaggctcttttggtgaatatggggctattatcgctgcttcattatggtttttacgccatatatggatgtttttaaagaagaaaaatatacaagggtttaaaaaagttaaagaagtgtatctatttgcaaaaaagtttcatgtattaattggatacgctataatagctgttgcaattactcatggtgtttacttttttataaaagggagtcgtcatattttactcatatacagtggtatattttctctattagccttaattgtactaggggtttttgggttttctttacagcaagtaaataaaaaagaaaaatttatgatgtatagaaaagtgcatcaaatcattgtaattatatttggaataggattatttattcatttaattgtctaggaggaactatcgttgcaacacattttaattattgaggatgaggaaagtttagcagattttctagaattagaactaaaatatgaagggtataaagtagatatacaactagatggaagaaaagggttaagcgaagcacttgaaaagaattacgatctcattttgcttgatttaatgctgcctggattaaatggactagaggtatgtcgtcgactaagagcgactaaaaatacacccattattatgctgactgctcgtgatagtattatggaccgtgtgacaggtttagatagtggagcggatgattatcttccgaaaccatttgcaattgaagaactgttagcacgtatgagagtgatatttagaagagaagaacatattgaaaacaagcaggtttcatttcttacattcaaagatttgcagcttcagattgaatctcgaactataactaaaggagatgaagaaattgaacttacaaataaagaattcgagttattgcttatgtttatgaaaaatattaatcgcgtacttactcgtgatgttttactggatcaagtatggggatatgatgcaattgttgagacaaatattgttgatgtatatgttcgttatttgcgaaataagttacatagtgtagataaggaggagtatatccaaacagtgcgtggtgcgggatatataatgaaatgataaaaaatattatgtttcgaattcgaaatctacctataaagtggaaactaacactttggtccactacactagtatttattttattcatcttatatagtgctttgcagtttattgtaattaataagtggactatagattatgaacagaaacaaataaataggcaagttacggaaatagcggcatatttccaagataaaaatgataccctttcgagtaaaacatttaaaaacagtaaagattttctaaacaatatgattgataagcatcaaatgattcgtattattgacatggatggggagccgattattactgtttcacgagattttaatgaaacgtggataaagccgaaacaggttataaaagatgagtcatttataaaaaggcatttagaagatcgaatattagttaagcgcataccaattaaaacgaaagagtttactggaactattgaacttacgaaaaacctagagacatttgattatttattaaaagttattttagtggtaatgcttattgctggaatatttggattgatatttagttttttaggtgggattcttataactaagaaactattatcaagtgttcaaaatataacagatacgatgaaacgtattaaaaagaatggactaaatgaacgggttccagtacgagaaaataatgatgagcttgcaaaattatcatttctctttaacgagatgatggatgaagtagaaacttcttttacacaacagaaacagtttgtcgaagacgcatctcatgaactaagaacaccgttaacaattattcatggtcacttagcgatgttaaaccgatgggggaaaaatgatccagcagtattagataaatctcttcaatctagtttaaaggaagtagttcgtttaaataaattagtttcagaattgctagaactatcaagagctgaatctgaacaattgcatccaatagcagctgagccagttcatgtaaatagcgtattaaaacatgttacacaaaactttgtagtactccaaagtaattttcaatttgatatgaaattcggggatgacgaggcttatgtgtcaatgccatcatcttacttagaacaaattattattatcataatggataatgcagttaagtatacaaaagaggttaataaatatatttgcatagaatccagtttacactcagggaaagttacaattcgtgtaatagatcatggagcgggaatacctgaatccgatttaccatttgttcttaatcggttttaccgagttgacaaagcgagaagtcgaaaacaaggtggaaacggactaggtttgtctattgcaaaacgacttgtagaaaaatataacggagctattaaaatagagagtaaagaaaatgaaggaacaatcgttacgattacattaccatgtataataaaataagccttcaaagaaggggtgcttcttgcattccttctttttttacgatcaaatcattttgtttatttcgaaatttctagtacattaaaattattaagggggaataataatgaaagctatcgtacatcaatataaaactggatttgacggtgtagaatataaaatatcacctgagagagcacttaatgatggggaagttaaagtgaagttaaaatcagcaggcttaaatcatcgggatttatttattatgaataatagaaaagaaatgcaattgcctttaatcttaggatcagatggtgcaggtattgttacggaaattggaaacggtgtttctgataacatattacatacagaagttattattaatcctagtattggatgggaacatgctactgaagtaccggagttaccggaagtgctaggtggaccgaaagatggaacgtttgctgaatatgtaattgtaccagctgaaaatgtagtagaaaggccgtcatatcttacttgggaagaatcaggtgttttatctttatccgcattaactgcatatagagcgctttttacaaaagggagattgaagtgcggcgaacacgttttaattccgggaataggcggtggtgttgctacatttgccatgttattcgcgaaagcaattggcgcaaaagtgagtgttacttcaagggtagagaataaaagggaacttgctgcaaaatatggtgcagatatttcttttcatagtgccggaaattgggaagagggcttacaaggtgaaaaagtagatttaataatagatagtataggtccagcaacttttttgaaatattttgatgtattaaaaccaaacggaagaatcgtgaattttggtgcaagctcaggagataaaattgaattaccattacgcgcgctattttacaatcaaattgatattatgggaacatccatgggtagccgtgaggaatttaatgagatgataaagtttatagaaaaatatcaaattaaaccaattattgacaaagtttactcgttagaagaagcaattcgagcactaagccgtatggaacatggagaacaatttggaaatattgtacttcaaatgaattaaaaaatatgattttgcaattagtatatttaaatgaatatgttatgtattccaaacatgaaaaaaaaacgaatcgccttattataaaggtttacgaactttatacataaatagcgtataaaatttgttttataattgtcacatgagtaatagtaaaatgagaattagatgagaaaagtttaagcccattttcataatggtattgtatactgtgtaaatcaagaacacttgtaagtagggagagagtattatgaattacacagtatttcagtggtttaataattttgctgattcatccaaactattagatacgataatggttgcaattacaaatagcgctgcatacgtagccattttatttatgcttatcttatggtttaataatggaaagaaagagaatgcaattagaaaacaatatacagttttatatacgacgctttcggttattattgcattagtagtaaatgttcttatacatgcggtatattaccatccgcgtccgttcgtatcacatgatgtacatcaattagtaccacatgcagcagattcatcatttgttagtgatcattctgtacttgtattttcaatcgccttcgtatttattcttagaggagaaaaactgaaatatatcgcgctattatgggctgtgttagtcggtatatcacgtatgtacgtaggtgttcattatcctttagatatacttggtgcagcattcttaacacttgttacgagcggtttagtaatgcaaagtacacgtatgtttgaaccaatagcgaaatttgtattcaaaatgtatgcattagtagcgagacgaattcctttcttagcaaaatataaccatatcgcataattttcttataaaaagttcccatttggaaatccagatgggaactttttatagtaaataagaaaagagtttagagtgctatgcaatcaagttttggtgaagttaatattcagaaatttcacgcaccgtattttaattaaataaaacaaaaaataacaatagttagttttgcattgttttaaaggaattaaaaagaaaacttcgaaacatatagtatcgtaaacaaaaactacaaattttaaaacgtatcttcgtacgaatccattccaaaagagaggagataagtatgcaaaaacttcaaacgaataaaggcgctcgatatatgatgattgcttttattgttttgtttcttattatgattttgcgtatattctatattcaggcagtaggagtcgtgcataatgtaaatgtaaaggacctcgcggatgaacaacataataaaaaaggtgttttagaagcgaatcgtggtactatctatgaccaaacgggaaaggtgttagtacaagattctacaacgtatcgagttgttgtgaatttaaaaggaaaagataaagtgaaaaataaagatgaaaccgcacaacaattagccgatgtacttgaaattgataaagaagaagtattaaaaaactttcatgaggggcgtacgcaagttgaaattggaaaaattggtcggaacttatctagggaaacgaaggaaaaaattaatgatttaaaaataccaggtgtatcttttatgtcggaaaaagcaagagtgtatccgaatgaagattttgcatcctatatactgggttttgctagaccagatgataaagggaatacggaaggaaagtttgggcttgaaaagagtttggataaatatttgcgctctacaaacgggaatatagaatatgtgggaacacgaagagggattccacttacgaatgatataggaaaagtagaacctgctaaaaatgggaataacgtatatttaacgcttgataaacaaattaatagctttttagaagaagcgatgaacaaagcacaagagcattatgatccttctatgttaattggcattattgctgatccaaaaacaggaaaggttttagcgatgtctagtaaaccgagttacaatcctaatgtaggtgatatcgaatactttttaaatgatccgattgcaaatgcatatgaaccaggttcaacaatgaaagtttttacgttagcagctgccattaatgaaggtgtatataacggaaaagagtattttcaatctgggaaatattccgttggttcatctgatataaaagaccataatggtggatttggatggggatctattacatttgatgaaggttttgaaaggtcatcaaacgtagctttttctattttagaagatcagttactgaagccaaataaatttaagcaatatatgaataaatttggattcaatcaaaaaacaggaatagatttacctggtgaaagtaaaaatactttattattaaatacgcaaattcaacaggttacaacttctttcggccaaggttctacagtaactccgattcaattaatccaagcggctactgctatagcaaatgacgggaaaatgatgcaaccatatattgttgataaagttgtaaatccaacaaacaaagaagttattatggaaaatcaaccgaaagaaattgggaatccgataaaaaaagaaacggcggacaaagttagaagcttaatggagcgtgtcataacatcttcaaaaggaactggtacaatgtataaagtggatggttatccaattggaggtaaaacaggaacagcacaaatcccgaatcctgaaaacggccgatatatggaagggaaagagaattacattttctcctttttaggaatggctccaattgatgatccggagttaatcgtatacttagctattaagcagccaaagttaaaaggagatgagtatggagctcagcctcttgctgaaatatttaaacctgttataaaaaacagccttgaatatttaaaggtgaaaccgtatacagaaaaacaaatagctgatgcaacgaagcaatctcaattaaaagtacaaaattatgtaaatcaatcgatgggtacagcagagaaaagtgtagaaaaagagaagatacagccaataattttaggagaaggaaaaacaataaaacaatatccacagtctggcgaggtaatgagtgaaggggatcgtatatttttattagggaataacgcacaaatgccaaatttaaaaggttggtccatgcgtgatgttatgtatttctctaagcttttgaaattagatttgaaaacatctggtacgggttatgtaacgagccaaagtattgaaaaaggacaaagtttacaagaaggagatacactagaactagaattagaaccgccgttacaaccgttaacagaggcgaatacgaattaattcaggtatttggaaggagctagatgcaaatggctctttctttagagctgtaagtaatttcacgcaccgtaatttttagaaaaaacaataaataaatgaattaacagagacacatcattaaatgtctgattattttttatttacagttaaaaacaattgtgataatatggaaaaaattaaatgcagtgaagagaagagtaaataaaatgaatttttcacagagagctccatttagctgaaaaggagtaaaaattctttattgaaccaagcctctgagcagcgcatcggaacctattattagaggatggtgtgacgggagctcccgttatagagctatggtataagcatgagttagaatgcagtacctgataaggttaatatggtgacatattaacaaactagggtggcaccgcgatgataaatctcgtccctaagattaaaagtcttgggggtgggatttttttattgttttaaaacaatttggaaagcgggggccaaaaatgaaaaactttcttaaagattggaaatatcctttactattactgtccggtgttggtattgcgaatttaggggcatggatttacttaatagcattgaatgtacttgtctatcatatgggcggctcagccttagctgttgctactttatatgtaataaaacccttagccactttatttacaaacgcttggtctgggagtatgattgatcgtttaaataaacggaagttaatgattcacctcgatatatatcgggcgttatttatcgctattttacctttacttccgtcactttggattgtttatgtattcgtattctttataagtatggccagtgcaatttatgagccaactgctatgacgtatatgacgaaattaattccagtagaacaaagacaacgtttcaactcattacgtagtttaataggatctggtgcatctttaattggtccggcgatagcaggggttttattaattgcgagtacaccagattttgctatatatataaatgctatagcatttcttttatcaggattcattacattacttttaccgaatcttgataagaaaaaagattcggatacaactagtaatacattatcccttacagtattaaaaaaagattggatcactgttataaattttagtagaaaacatgtgtatgtcgtatgcgtgtacttcttatttcaaagtatgttcgtattagcaaccgctactgattcacttgaactatcgtttgcaaaagaggtattactactaacagatagtgaatatggttttctagttagtatagctggtgcaggatttattttaggtgccataacaaatacaattttgtcaaagaaattagcaccttcacttctaattggaataggatcattattcattgcaattggttatttaatttatgctttttcaaatgtatttttaatagctgctattggattctttattttatctttttcaatggcatatgcaaatacaggattttatacattttaccaaaataatatccctgttcatatgatgggacggattgggagtatatatggacttgttattgcgatagtaacaatctttattacaatattatctggtgttgcgactcagttcatttctatacaacttgtagttattgtaggttcattgattatgttatttattactatcgtcttgtgtgtgtttactttattcccatcacaatctaagttgtattctactgaatcaataaagtgaaactttaatcagggggcatccccccactgattatcagccctcaccaatcgagcttttacgggcagcagggtccccacttaacttctttgctttcgctgaattttgagatgggggtcttactgtccacaaatagcgggataaattcgaaatgaactttgtgttctcattaacaatttatcgtatttaataaaagggttctttcccctttatatggaaaaatcaataaggggaaagaacaataccgaaagataagggtggttgtcgtgataaaaacaaaagatgaaattgataaaattgtaaaagaaatacaaaagaaaatagatttctctggagtagttttagtaaaaaaagaaaaagacttagtctatgaaaaagctttgggttacgcaaaccaaagtgaatgtataaacaatacgatacaaacaagatttggcattgcctcaggatgtaaaattttcactgcaattggcatctgtcaacttgttgaaaaaggttttatttcttttcatacaaaattaaaagattgtctagagataaaattttcaaacttcgatgaagatattacaatacatcaactactaacgcatagcgctggtataccagattattttgatgaaagtattatggataacttcgaagatctttggaaacaaacacctatgtatctattaaagagtttaaaagactttttaccattattccaaaaaagtaatatgatgtttgcacctggaactaagtttcactacaacaatgcaggttttatcatacttggattaataatagaagaacagacgggacttaaatttacggagtatatagaaaagaacatttttaatccgattggcatgaatgattctggctatttttcgttagatagattaccaagacatacagctctaggatatataaaggacgaaaccaaccaaaattggagaacaaacgcctactctataccgataaaaggaggagctgatggaggtgcatatgttactgcaccagacatgctgaaattttgggcggccctatttaataatgaaattttaggaaaggaatatacaaaattacttttaactcctcacattcaagtaaatgataaacagtcctacggctatggaatatggattgaaacacgagaaaacaaggtattcaaatatcatgtaatgggatatgatccaggcgtcagttttcgctcggctatatatccagaattaggaataactttagttattacgtcgaataaaggggcaggacctgaaaaattaatgatagaaatagaaagagctttttaattatatggatttaaaagaagagatacgaaaataatttaaacgggttcatgattgtttctgttttgaaaaatattttagttaacgaggaaccctttatttattaaataaggtttttttgtaattctgtacaattatatataattatatggatttttaaattagaaaacattactatatagttgtaaatttttattattaattcatatgaaaggatgtgttaacaatttgtatatgattaacggtagtgtgtttattattttaggagttatttgttatttaattgtacgtggaatattaattagtaccaaaaatacaaaacatgtaatttggtggaaagaaataataagttttttatttgtgatctacatttgtatggttgttgcagtaactttattccctttaccaatcggttttccttttaatattgaaaatctgaatcgctcggtcaatataataccatttgcatcaattattaaagacatcaatcaaattggtagtgcttatgatggagataccctatttatgattggtctaattgtaagaaatgtaggcgggaatattttattattaatgcctttaggatttttagcaccaatcctatgggataaatataagaaattcaaaaatacaattttattaggattttctatatcagctagtattgaattgctacaattaattgagtctttatttagtggagtgggacgtattactgatattgatgatgtgatctgtaatgttataggttctattgttggatattgtatttatattatctttttaaaagctattaataaatttaacattcgagtgttgggtaaagctaattctaaaggtgtggaattagttgataaataggagtttaaacgagttattaaaggcgtacgagtaaaaagtacgtctttttatttttataaataatgcttaaggctgatgagaaatcacatttttcatcttacacttgaaagtagctatggtatttcaagtatggaatgaaaagaggagaatataatctttaaagataaacaagtttataggaggattctaaatggatattttacttgttattcttattattgttttgatgcaaagtaaagaacgaaaagtgaaaataaaccgtatttggctcattccggctttgttgtgttttgtaacagttcaatccattattcatatgggacaaataactttgctgcaaggactactgtttgttgtaatgcttggaattggcttatgtcttgggattatacggggaagagctttaacatttcgattagatagtgaaacaggtcatgtactacgaaaaggaaattgggtaagtacaataatccttcttgttattttaggagcaaaaattatgattaaacaaagtatgttttcgggtagtacgcaccagacattaatggttgtaacaaatgcctttttatgtattacattaggcactgtgattagtagacgttattatatttggaaaaaatataatgaattaacacaaaaagcgtaaatacattcatcccttgtttaacattgctaagaacggtaatactaattaacattgaacttttacaacaagggatgataatatgatatacatttacacagattttggtggaacacatactacctcactagctgcagcgtatcatttaaataaattaccaacggatcgcaagttaacgaaagaagaaattttgaatgtagattactttaataaattgaaaacagaagatatgggaaaaattatttttcatggcatagatgaacatggtcatcctgtatatacgattggatgcggcgcatcaaaagttgttgtaccagcgatgaagcatttaggagaaatcttgcaaaaacattatcaaagtcatgaaaagattattttttctaatacatcaccaaccgtacctttaccaatgactttcggtgggctgttttctagaaggttccatatcgattttattggcgtaccgttactcgtatggggagcaaaaatttgctgtgataatatacaaaggcttgttagttatacaaaagaagctggccgattaacgaatgattatgttgtaattttagataatgaaacttttaaatagtatatgataacaagaaaatcgagcaaattccttgattttcttttttatttgtgaaatagacaagaaatagtcacatttaatatacatctactatagccaaaacaataaagtcctgttactattacagggatattctcttttcataacataaatatatagaaaaattagaaaagaggaattgaattaagggaggaacaacatgaagcgtgttgcttggattactgatagtacaactgcgaattttaaaacagaaggagataactttgttatcccaatcgaagttattattgatggaatttcgtacaaagattgtgaagaaggtgtacgtgaaagggtttataatgcgttaaacgaaggtaaaacagtcactacttcacaacctaatattggggaaatggtagagttatttacgaaatgcaaagaagaatatgaagaaggatttgcagttgctattagcggaaaagtaagtggaacctatcaaaatatgaagttagctgcagaaatggcaggttttccattaacggtattagacagtgaaacaacaagttatccaatggatgaactaattagaaaagcgaaatcgttatacaatgatggtatgactttacaagatatacacaaaacattagtagatgaaaaaagaagaccttttcatgtattcccaaagagtttaaaaggtctatatgcaagtggccgtgtaaagggcatgcaatttttacttggaagtttattaagtgttaacttaatattagaagtaaaaggtggagagcttttacttgaaaagaaagttcgtaaaatccaaaaatgtcgagaatatattaaaaatgaacttgaaaaagaattaccaaaagtacttcacatgttccatgctaacgataaagctggagctgaagaatggattgcagatattagacaagcattccctgaaatggatttcaaattatatccattaccaatttcatttgcagttcatgcaggtgaaggtacaatagcaatcagttattaaagtaaaacccgtgaatgattcacgggttttttcagagtgtcgggaaagaccttatatactataaggtcttttgtacctcttaaaatggcttgaatagcgtttatttgaggtcattaggtagttagagattgatgactatctttaacgaaaaaagttgaagtcatatttttcaatgttaataaatcagaatattctttctattatttctgcagttacaatctatttacatataagattattaggattatattgacaatgaaagagaaaacaatagatggaaggggatgtttttatgttaaaaaaagcagcactagggatttcatcgttagcaatcacagcgttcgtcggattagggatggcaacagaagcttcagctggaccagcagcaccacttacttcactaaacgtcgtacaagtagagtctgagctaggcggggtagaaacaattaatcagaacagcttcagcacatcgcgtaaccacgggggaaaatatttatatattacaacgaaagaaatgggctatggccaaaacccatttgctaaaatgaatggttctaatgtaaaaagtattgattccactataattggcggaagaccaatcgttggctggtattataaatgggatgcttctggacaccaacaaggaacttttgagtaccaaaagacatctataaatgcaccatttaatacaatgcgtacatcgatttatatccaataattttgaaagcgttcgcacatatagaatagtaaaaaaggtacttctaggagtacctttttttgatttgaatcacgttcatctatatttacaatcctaatttcacagcaagaatacttcccataaaacaaaatccttaaacgtctataaaattaatatgaacgcgtagtacaagtccgctacagttaaagtacgtaattttacatatttcaactcaatgaaaaaggaagaaactgcagtacttacgccgcagttttaaattcatccatgaactcacagttttttagatatataaacataaacgtactacttgctactcttttttaaattcaagattacaaaaggagtagttaaacttatataagcttagcttaatggggatgtggcggaactttaaaattaattacatctttttcatagcataaataattttgtatagggagatgaaaggatttttttaaataataaagaagtatgtataaacaaatatataaatggtagtgattaggatgaaaatcagtaagtttgcagaagtaaataatgtaagtgtagatacgattagacattatatggacctcggactcgttatttccgagaaaaaaggaagtcactatttttttgacgagtattgtcaaaaggatatagaacttatattagagtacaaatggctagggtttagcttgtatgaaattaaagaactgtttctttataaaaatttagggaaatccttaggctatgaaaaggataatttttatcaatctttatttaaagtaaaatatgaaaagattgaacaagaaataaaaactttagaggaacgaaaatgcaaattaaaggaagcgttacataatttatctatagaaactgaaatttcgagttcaattttaggggtagatttaaaagtacttcatttatttaaatgtgttaagtgtaacggaaatttaattcttgaagatggcattattaataagaatcaaattattgagggaaagttaatttgtaattgtggtgaagaatacacgattatttcaggggttttaacagctggtaactcagtgaaagcgtatgaaaagaaatcacttgaagattctatttcggattatattcatgaaactgatactgcttttttggaaaatgttcaaagaggaggagaatgggcgaaaaagaaactaatgcaattagatttaaatgaaaaaatactacttgatttagggtctggtattgggttctttttacgaaatatttatgaagaactaccggaagagtgtttatatattgctgttgatcgagatttgaataaacttttacttttaaaagatgtaattgagagaagaaatgtgaaaagaaatattgtatttatctgtgccgattttctaaacatacctattcagaattattctattgatattgtaattgatcaatcaggtacaagtaattatagttttgaacatgaggagttcttattgtgcgaattaaattctctttttaaacacaatagttatttattaagttcgtttattttatttaataaatttagtataaatagccaaattgcacctagactcagagagaattttacatctgtaaaagtaacgaaagaaatccaaaatctacagtttcaatcgattgatgaaagtacttcaaattatttgatacgagggggaaagtacgaggatttctttgttcaaggagaagaaatttatacatattcatttttcggaaaaagatggggttaatcccgtcataaaaagtccgtttttataacgggactatttatgacgattcctatctatactttttacgatgaaaagaaaaagagaatgttaatctaaatgtttagcactcactggacagtctcttgtcggtgtatgtctagtaagagaaaagatagccaaacctaaagataataaaactaaagatccaccaacccaggccatattggcgacattatgtacttgttttaaagctatacctccaactgcagagccgagtgaaattcctatttgtagggctgaattattaaaactttgctgtatatctgacgtatccggggcagtttggattaaataactttgttgaggtggtgcaagcccccaactcaatgcagcccaaactatcataacaggaataaataggataatagaaactgcagtaaacggtaatataaataagattagagcaaatagagtaataactatcaaaatacttttttgagcgcctattttatctgataatacaccgccaaacgcaccgccacttactgcagctataccaaacactaaataaaatatgctaatccaataagggcttaggtgaaacttattttctaaaaaaggagtaaaataagcatatagagtatagtgtcctgctaacataaacatggtagctagatgggcagatcctagtttaagactacaaacggcctttaattggatagataaaggagttcggttttcctctccaggtattttatctaaaaatactgaaattaagataatagaccccaatgataaaatagctatacataaaaaaataattctccagccaaatgtgtttgaaattaatatgcctagtggtactcctagtacaagtgaagagctaatacccatataaattaatcctaatgcttttgctcgataagcgggattaacaattttagctgcaattgttagggaaagtactacaactaaagcagtactcatagcagttaaaattcttgctatcatcataaaagtaaagttcggactaaaataagtaagtagattaccaattagaaaaatgtaaagtgaaataatatataatttttttctttccactttacttgtgaaaatcaataatacaggacctgctattgcataagtaaaggcgaaaattgtaattaattgaccagcagaacttaatgaaacattaaaatctttagcgatgtctggcaatattcctccaacgataagctatacaagacctaccgctatcgttgctaaagctaatataaatactttgaaattcattttttatattcccttctctgcattatttaccgtagaacaaaaaaactcctgactacaaacgctaaaagacgcattttgtagtcaggagttgttggttcctggtagagacccccaagccatattcttggagttatacatgattctcatatgtaattaatcaacgtaatagaagataccatattattttttagatttcaataaaaaatttgcatttgtacatgtgatcttattaatcattttattttttatcgttgtaggaggcactaatatcttcagttgatgtgcacggggttaactccatcttttttcatttctttgtagtaatttttaaacacagtgtattgatattgggttaacccgagaatttacactttatgtaatacaaagaaaagtggaggaaaagtgatgggaagtttacgattacatatagaaaataaaaaaagaaaccaagaactaagaaatatttgtttatattcaattgcaaaaacagtatcactattcggtagctcaatttatagttttgcattaggattgtatgttttacaaataaccggatctgcgttacattttgcgattacgctcatattaggaacgattccaatgattgttatgaatccatttgctggtgtcattgctgataaggttgataaaaagaaactcgtcgtttgtatggatgtactaagcgggtgcttattaataactgtttatatattaagcaactattatggattaaacttattcattatttatactactacctttcttatgacagtatttacaacgttttttggaataggattaggggccgtaaaaccgaatatggttactaaagaacggttaatgagtattaattctataagtaaaattatcgattctatatctttaattttagggcctatgttaggggggattgtttttgcagtctttgatattaaaatttttataattataaatggtatttcatttatcctttcggctatttccatattgtttattaactttaaattgtttgagcaaaacataaatgaggaatgttcaattagagaaattaattttattgaagatataaaggagggatactcttacttattggagcggaaaagcttaaaaaatacttttagtattttaatttctcttaatttctttttaggctttgctgtaaccgttccgttgccatacattattaacacagttctcaatcttaattctaagcaatttggtatgattcaagggacttttccgataggtatgatagttggtgcaatattagtaaaaaagataactgattgtttttcttattcttatctattgaaaaaaataagttttatgttggcaatttttatgatagtttcaggaatacctgttttatttaaacctattgtagtaaataatttggtatatgttactacgtattgcatgattatgttctttttaggatttatgatagcacaaattgatattcctttaatgtatttcatgcaaaatgagattcctgaagaatatagaggaagagttcttagtattggattaagcttaggtaaaataatgcagccaatagcacttgcaatatcaggactgttattaaatttcattccagcctacacgcttcccattgcaggagggattgtattttttactttgaataaaattttagcaaataagttaaatttagaaattcattcaaaagattatagtgtttaacgtaacttaaaaagcgcaggatcagcatcctgcgcttttctatcgtaattcagctgtttttctaataacaatcttatcaatatcatcttcttcatcaccaataaataacccgcgctcttttaaatacgcttcaaaatataaatctgcttctgcacgttcatcatacggttttacagataaaacgaaacctaatttgttttgttcttctaaatgagaagtggagatgtaagccggtacattgtggcgtaaaaagagttctttaaccggaataatcatatctttcattaatttcgttaacatacccatttcaaactcgaaattaaagcgatctatactacataaatcagcgaatactacaccaataaaacctgtattaaatacttcttgatattctacttcttcatcattaccgtaaaaattcttttcgattaaataatttacaaaataagcaataccatcactttgttcaaatggtttcgttgaaagaacaaagccgattttcttttgtttatgtaaatacacacatgacatgtatgctgaaatgttatgttctttaaatagagaacttgttgccccagagaggccatcaagtacgtgatgaacaatttgaagttttttacgagcgaaataataggatttcttttgtaactccaatgtatcaataaagacagagccgataaagcctgtatttgaaatgataggtgtttgcttttttcttcctctgcgctttgcttgagccattgtaaaaatcatcccttcatgtacaattaaaataaaaagaacgtttgttcgtatatttatattttactattaaaacgctataaagtaaagggtttttgacgaaaaaaacaacaaaaaagacacctgtaaagggtgccttaaacgctgtagggaagagggttcatccctacaatttatattatgatacagaaacaatctcttctgtatcttctccatctaaatgacagtccatagtacgaacatcttgatcttcatgacttccgaaataaatagtaattttcatatgtatcgctcctcgtatagtatgtttaaacttaatttttttactttcatgagagacctgtaaaattaaagaaaaaatctaagtctgaaataggacttaaatattaatatacgaggaggatatatgatgaaagctatcgttgtaacgtcgttcggtggtcctgaagtgatgaaatatacagatttggatataccggctatttcagaagatcaagttttaattcgcgttgttgctactagtgtaaatttcgctgatattaaattacgttatggtaaaaaaggaaataaagcactaccttttattccaggtatagatgccactggtattgtagaacgtgtcggttctcatgtgaaaaatattcaccctggacaacgtgtcattgcttttcctcaaaatggatcttacgcagaatacgttgttgcaaatgaaaatcttactttcgtattaccccatgaagttgactttcaaactgcagccgcttgtccaatcgtatcttttacaagctataatttactcgcaaatgttgcaaggcttcaacaaggtgaatctgtactcattcatgcggctgctggcggaattggcactactgctattcaacttgctaaactattagaggctggagctgattatgttatttgtcatcaagatgaagattttgtagagaaagtcaatgaactgacaaatggtgaaggggttgatgtaattttagactctatttctggaacggtttctgaaagaagtttaaactgccttgcttattacggtcgcctcgttcatttcggtaatgctagcggtgaaattggtaactttcaaacgaaagatttacatgcaagttgccgctctatactcggttttagctttggaaacacacgaaaaaagcgtcctgaactgctccaagaaactgcaaatgaagttttccgttatttgcgtgacggacgtttacaaattaaggctacgaaatcttttccacttcaaaatgcagggaaagcacatgaatgggtcgaaagtagaaaaagtacagggaaagtaatactaaccgtttagtcctcttcctgaaatgaatactggaaacagaggtggcattcatgggatcacgaattatgcatgttattatcgctagtggtattgctgagaaactatcaattcacgataagacttctttcttacttggagctgtagcccctgatgctgttcattcaaaaaaagaaaaaggaacctcacatttttatgccggtacaacgaagaactatacgagaagaatagattatgattcattttttcataaatatgaatcacatatagattccccatttattttaggctattatacccacctcattgccgatgataattggctaagtggattttttctaccttggctaaaaaatagaatagagaatgacgaaactatcgcacccctgtactataacgattttaaattgttaaatgcaaagttgcttcatcattacgatcaagaacaacagcttttctctcttctcaatcaagaggctcacattgtggatattgaagaggtttctagagaaaacgttttagcttttcgaaagtatctttttgaagatatgttgtatccaaagcaacatttgcatgaagacttacaagtatttacgtttgaccaaatcgttggctatattgagacagctattgaaaaaggagtattttttattaaacaactctctaatgaaaaatccacttcaaaaatttaatccccctcaaatatatttgagggggattttcacatagcaatattattattggttcttctccataaccgcaaaataattcccttcgctatcagcaaagttaaacactttaccagaagacatagttaccatttctccaacagtaacatttttatttgttaaatctgtatatagttgatcaagattttctgagaagaacattaaagacggtgtaccaagattcaattctgggctcattttcgaaataacttctttattatgtaatataatgctcgtttccgcaccgcttttcggagcgatttcaatccatctcattccttgcttattatcttcctctgcaactacatgaaaccctaccttctccgtccaaaaatttactgcctcatcttgattatttacatataacataatttgtcctactttatggatcattacatttccccctaatggtttttatattctatgtagctttctacaaatactatcgttattccttttgagttggtatgtacttctttgcaaaatttatcgactgactcatcccatccagttcatcaaaataatcatttctttcaatcatgttatatccgtcgaatccaattttatctaatactttgaagaatatatcgaaatctacttcaccattccctgctgcgacttctatatacttagttgaacgatcacttttcacttctttacaatctttaatatgagtttgtactatataatcttttaatagtaataaaccttctcccggattttcatttacatcacttattaaatttgctgggtcaaagttaacagctagtcctttcgagtttgcagtttctaaaaatcgttttaatactattgctttttcagatcccgtctcaatggcgaagaatcctccaaatctgaacgctaagtcccctatttcattacaaacacgtagcattttatcatagtactcactattttcatcatcagggattttcccaatatgggctgttactatgttagctcctaaccttaaccctttatcagtaatatatttaaaactctctattacacattcagcttcagttcctattattccattttctccgaagctaattgctaatgacgggacttgaatctcattaaaagataagttttcttttaatgtattccattgtatctttgagatgttagctaagttgaaagtcggattcatagcatataattgaatatattctaaatcccattcccttgctttttgtattccttcgtttacttcaatatattttgtattcaaaaacattcctaatttcctatccatatgtgtaccttctttttattatttcgcatcattttaatattcgacttttttatattatttcctcgtataaaccaaataaataaactacccttttttcgatactcccagtagaagcatatatatgataggcacattaaaaacactaatacaattcccattatcacttgtttacaaacaaaaaagacgtaactacaaatagttacgccttctccatcatttatctaggctttttcttcccagtaaatgctggtttctttttctttggtgctttcggtttcgtttctacgaatgatcctttgaacatttcttgcttcgtaaatacgatgcctagttttttcgcaaattgcagtaatttgcgctcttcttgtggagttacaagagatacgacagttccttctttacccatacgtccagtacgtcctgagcggtgaatgtattggtctactgtgtctggtaattctaagtgaattacatgtgttaaatcgtcaatgtcgataccgcgcgctgcaatatcagtagcaagtagaatttctaatttccctccgcggaaagcacgcattgtcgcttcacgctcttgtttacttgcttctgcatgaagagccgccgctttcattttacggaatttcaatttctcagtaatttcatctaaacggaatggatcgtttaagaaagcaactgcttttacatcgcccatatgcataattcttcttacgtaatcatttttttcgcgtcgctcacaaatgatatacgtatgctcaactaagctttttgattctgcacgtgttacacgtactaattgtggttccactgctaaatcacgtgccgcatcttctgccgcttttgtcattgtcgccgagaagaatactaattgacgatcgcgcatcgttgatttaattacatcttgcactgcgcccatcattttttgctttacaatttgatcaaactcatcaaatacaattgtttttacttcatgcatttttagctttttcatacgaattaattctaaaatacggcctggtgaaccgacaattactcttgggtgtttctttaatttttcaacttggcgcttaatatctgcaccaccaattaaagatgcacctgaaatttcagttcctgctgtaaacttttgaacctcttcatgaatttgcattacaagttcacgtgttggcgctaaaacaacaacttgtggctgttttacttcaggattaattttatgtaaaagtggtaataagtacgctaatgtttttcctgttccagttggagattcagctataacgtcttgtccttctaaaatagttggaatcgcttgtttttgaatttcagttaactctttaaaaccagccttctcccaagcttgttgtaaaaatggttgcatatcttttatcatttgtttttctcctttatctctatttttgaagaaaatgctgtattgttcgcaccgtttctatcatgtgtgaaataacagctattaaatcatcaacatggtcttctgtaatcgctttttgaaatagaacctctaccttattatgatatgaaatcgcttgcttattatattcgtatgaaactttctgcataatcattctttcttttccccatatagaacgcattaatgtttcaattccttcgcattttacttctggttgttctaacgggaataaaaatgctagcttcatttcacaacctggtgtaaactgaggcacttctagtatttcaccagacaagttctttgcatccacagataatgaaaatgttgcttctactaatggttcaaacggttctgttaattgaaatgagatatgatatatacgacttaatgaagcaagatccatcatatcttttcgatctgttacaagaatatctccatgtagatcaaaatcatacacagcaccttctacgattacttttaaattgtcaaaagcagttggatcaaacataatttcctccaaaaaacaggcgcctttcgatggaaaggcgccacttgatgtatatatagtttacagataaacgagatgaattacaaccttttagaataaacctactgcttttccatcttcatttacatccatttgaagtgctgctggttgttttggaagacctggcattgttaacattgtacctgttaacgcaacgataaagcctgcgccgatagatggttttaactcacgaattgtaacgataaagtcagatggacgacctaattttgttgcatcgtcagaaagagagtattgtgttttcgccatacaaactggtaggttactccaaccttctccttcatattgagctaattgcttacgtgctttcggagcaaattcaatatcttttgcgccatataccttttgagcaattgtacgaattttttcttctaagggtaattctaattcataaagtggtgcgtagttgttttcacctttttcgatttcttttagtactttttcagcaaggtcaactccgccttggccacccttctcccaaacttctgttaaggatactgcatagccacgctcattacaccactcttgtaagtatgtaacttctgcatctgtatctgtaatgaatttattaattgcaattacgaaaggcacaccgaagctttgaattgtttcaacatgcttctgtaagttttccataccttttgctaatgcatctacattttcttcttttaattgatcttttgcaacgccaccatgcattttaagcgcacgaatcgtcgcaacaataacaactgcttctggtttaatgccagctgcacgagctttaatatctaaaaacttctcagcgcctaaatcagcaccgaatccagcttctgtaataacataatcacctaattttgctgccattgttgtagcgataacactgttacaaccgtgagcgatattcgcaaatggtccgccatgaatgatagctggtgtattttctaacgtttgtactaagttcggctttaatgcgtcttttaataatagtgttaacgcaccttctacacctaaatctttaaccgttacaggttgatttgcaaagttataggcaactacgatgcgagataaacgtgcttttaagtcttgaatatctgttgcaaggcagaacacggccataatttcagatgctactgtaatgtcaaaaccgtcttcacgtggtacaccttgtacaggtccaccaagaccaattactacgttacgaagggcacgatcatttaagtcaacgcagcgtttccaaacgattttacgcgtatcaattccaagtgtgtttccttgttggatatgattatcaataaacgctgctaatgcgttattggcagttgtgatcgcatggatatctccagtaaagtgaaggttaatgtcttccattggtacgacttgtgaaaaaccgccacccgctgctccaccttttaatcccatcgtcggtccaagagatggttcacgaagtgcaattactgttttcttaccaattttgttaaaagcttgacctaaaccaactgttactgttgatttaccttctccagctggagttgggttaattgctgttactaaaacaactttaccgtctttcccatcttgtaagcgcttaaaaatatcaagagataacttacctttataatgcccgtatggctctaattcatcttctaaaatatttaaatcagctgcaatttcttgaatcttcttcatactcgcttcttgtgcgatttcaatatcggatttcactgttgtagtagttgtcatataccctagtccccctttaattggttctgatgatattgtatcagttttttgtattttctgcacttatttacctcctaaaaattctttcatttctttatacgttttttaacataaatacccataagaatgttaacgattgttgtaactctgtaggtagttgacctaacatcttctcatttactccgcgcttatatacgccgatgccatctacaactttaaaaccttgttctttcgctaactgttcaaattcccaaggcatcatcgtattacaaacaacgtcttttccgtacaagcgaggataactgttctctcgtggctttgctgtcggtcctaaaattgcaatacatgcatatccatctttctttaacacacgctttatttcatttaacgctcgtaatggctcttccgtccattctaaagaattaattgccataattgattcaaattgctcattttcaaatggtaatgcagaaagatctccttttataaaagataaattcggtccttctccgcgttccttacctttttgaatcatcacttccgataaatctactcccactgctttatagcctgcgcgacttaatttatatgtaccgtagccatcaccacaaccaacatcgagcacttgtgcttctttcttcacgtattgttcaaaaaacggaataattgtacttctgctaccactgtcccacatctcttgactattttgattccaaaactctgcgctactatcccatttcttctccgctgactcgtgccaattaaatttcgtcatacattcccctaccttcacgtattatcattcatttcattctacatcattttccaaaattcctgttttatcccgcttgcagtaagacacctacctcaaaattcaatggatgcggattagttaatgggagagaactgctcataaaaatccaattgttgctggctgataatcagtcctagtggaaaaaatcccacactttatcttcaataggagatggatatgttaacgatggaatgcgtattctccaatttttgctttacttgggtttaactcatactcatgctccttctcattttgaaagatactatagatacacccaattgaaagagagggatgtacatgcgaagaaagagaaatcatcattttaaaagtggtgaaaaaaacgaagagtatgctgctgaaatatcaccagctggcattccaattagacataagcggaaagaaattgcaaatgagatagaaggtacaaataccggcacaatggtaggctatgtcgctttatttctttcgttattctccattgctttttatccagttacgctcggctccctagcaattttagttggcctattagctgtcaatttcggagcaagaacacttggatatacagcaattggttttggtagtttttctgttttatttactttactttatccgcttgctttgtcagcgttttaaaaaaacacaccaagttatacttggtgtgttcattcatgatacaacataatatgaccgcatccacaacaatgtttcgctgtaatttcttgaaacactggataattttcttcatctcgatgctcaataaatactttttcaaatcgatacatgtttggtgcatatgcccaatcttgtttcgtacgtgcatataacgttgaggaaaaaaactcctcaccaccgcaaacgatacatgtgttcttcatcgctatccctcctatgcttgtcttacttcatctatatgaacataagcataaaaaaaagaccttctattactagaaagtcttctctgaaacaaaaagaaatgtaccaaacattcctactccgctatattcttttgaaacaccagcttctgttttaaatgtttgctttacagtcataaagaatacaccatttcgtgcatctgtactttcaaattgtagtttttcttttttaccatctacattttgcgtgcattcaaaactactctcattacaattcaacgcatacttatcctctacatacactttaaaatctgattctttcggacaagttataagtaatattgccacgagaataatacttataatacccacaattgtataatatttcttcatttgtactcctttcaaatgacaagaaaacttgacttcatacgccaagttttcttagtcaacaacccattgccactcttgttctttcttatcaaaaatgagccaacctgtttctgttgcttcctctttcaattcatcgatattatctaacacctcatccgtactttcatacgaaccaactacatataccggaatttcaagacctcttcttgactcaatcttccctgctagatctatgtaaagaccatcttccattagtggaatcagtcccatgatcaattcttttgaaattgctggaaaaatttttgatttttggaagaaagaaaaacgtttcttaccgaaagcaccgagtttatacggaatgactttacttaacattcctacaaaatcagcaattctacgataatacactttgttgtaccatccgtcatcatgtgaaaaataaacaaatcgatttttcaacagcggaaagaatgttcttgcaagtggttcttttttgtgagccaaatataataattctgcaatttctttcggctctaattcatctaaatcgcttgcatcatcaaaatctacccaacaaaattcatcaaattcatcaatctctgcttgaattaacttatgtatattttcttcctcaacatattcaaataaagtatgataatgaaaatccgtccattcaaagttgtgcttcaaaagcaacacttgatgaagcggtgaagggatgttactcgcaaactctttaaacgtaattcctgatgtaataaaacaatgacctcgacgattaccattaatatatatcatattctttacttggtcagatcctccagacaaagcacctagccaccttcgttttatatgtttcaattctatagcatattttaacatgaaaaattttagaaacatagaaaaaacttcaaaaactatttacaatttcatgtgttttattacatagtgattacaagaaaaaacgcctgctcataagcaggcgtttttaaaggatttcatcagggttttgaggatgatgatttccctctttcttttcttctttttggaacatcgattgaattttatcaattgtttgtggagctaattcaatcattttttctgctaaatgtgtcgcattttgtaaatgaagaatatttactccatctttattcaccacaagaaatgctactggtgtaatagaaacaccacccgcgctaccgccaccaaatgcagcgttaccgtttgctctttgtccatcattcgtttggaaatcagaacctcctgctccaaaaccgaacgctactttagaaaccgttaacaccacaccaccgtcagccgtttgaacaggctctccaacaatcgtatttacatcaaccatttcttttaaattttccattgctgctttcattaacccttgaattggatgatccaccgttcataacctcctttgtcatatctttcctagtttttccgaaagtttgtgaactaaacataaaatttaatattgatttcaaaaaacttaagttgtaatatttagaaaaataaaaaagaggtcgattcgttatgatgcgaaaattaacaaagaaagatcatgaacaagtattcgcttacctaaaagaagaagcagcccttaacttgtttattattggagatattgaagctttcagttatgacacagattttcaagaactatggggagtatttaaagagaatggaacattaaaatcaattttactccgattccacgattcatttataccatatagtaaagaagactttgttaccactgattttgaggcacttctttccgcatataagccacttaaactctctggtaagtcaactattgtagaaaagtttgaaactgctccaagtctacaattaggcgtcaaaaatgaaatgtatttttgtgaatgtctaaatgacaacaacttacctgacacgcctattcatgaaacgattaaacttgcgtcactcgatgatatagaacgaattatgaaattacgaagtgacattgctgaatttccgactactaatgaatcagagaaaatattaaggcaggctatcgaaacgaatacaggacgcacatactatattgaaaaagacggcgtgatcatcgcatccacctctacttccgctgaaaattcattatccgctatggtagttggtgtatgtacacacccgaattatcgtggaaatggctacgcttcactcatattacaaaaaatgattcaagactttacgaaagaaggccgaacactttgtttattttataacaatccagctgctggacgaatttataaacgactaggatttaaagacattgggatgtggacgatgtatcgataataaggggtactttataagcagaaatagttataacttaacaataaaagcagattatacacaatttcatactgttattatgaagataaagaagctacttgcggagcaatgactctaactaaaacatgttatgtattcaagctaaatttagatagataaacgccccaattgttgcatctactccaacaattggggcgtttatcctcaaattcttcccactatatttatgaaacatttattccacttatgtcgctattatctttccgtacaaatgcccttctaaatattactgcgtcttattatactttgctttaaaatcaatatattcctgtttcgcatcttggttattaccttggtgactatcaaaagatgtatgtatttgtgatatgtattttactaacttgccttcatcatttcttttcttataatttattacaatacttacttccaatatctgctttgaaccatttttagaatcaatatgcaatgcgattgatccaccatcatattcatcatattgtattttcaacttatcattaatgatactctgaaactctaattcagttagtttgtatccaacagtactaggctgatcaaacttttttatatcatccccgggcttcatctttagtttccctatcccttttaaacgatctacaattaagttcacatatgaaacatccagatttgattccggactttgtacctgtccatttttatacataatattggtacgataaacaacttcttctttattatctttgctgtctactgctgaagtaacctcttgtgttgtatttccatataaacttttatctttcgtattatatatcccttccgaagtttgatagattgtttttctatgctctccatcttccttttgctcatatgtactatatatacctctttgttccacatacgcatatccatcatcactcgcagacataacctttttcatgtcaccttcatccaaatctttgacaaatggctcatattctatctttttttcaaaaaaactacatgcttgtagtaggctgattgttattatgatagtaatcattttagaaaccttttttgtgttcatttcatcatcacactacccactctacattttcgatcagataaccttctaatcactttaatcaccttacataattaaattttcttttagaagttaaaatactctcctgtaaataattacttttctatcatcaaaacgtacaatacgcactttctttatgccttacgtttcgatttaccttttttatttttctttcgatatcttggagtctctcttttatgttgctcccacgttttattaaatgatggaaatttaaatctgcaatatgctaatagctgaaattcagctgcaccgattgctatcgtatacattaaaaaggtccctactacatacataaataaatcatcaaacccataatcgttatgaaaatatatcaaaataagaatagttactgcgtatagtgtagcccacttcatcatctttccttttgttttactaaagaaagaagcagacctctcatccatactaaacgcaccttcacttgccaatttaaatgtatctattgttgttacgatatgaaaaattactgctcctaaaagcaataaacccgcatacagtattgtaatccaatcaattgaattattagccattttagtaacagtcaaagcaataggagctattgttgccaattggaatgaacataataatacgacaagggtttgtagtttttgaaatttaaattgagctatcggaaatgaataaatgacgaaaagaattatttgtataatatataagaatacttctaacttaacaattcctatattaaagagaagcatgcagtaatcccacccggctgataaaacaatagaaaaaatggttattgaactaaatagtattcctccaaacataaatcctgtagccccctcaggacttaaacgatcattacatgtcatcctaaacttatctaaatcttcttcttttatattccacaccttgacatttcaccttctatacagtttaaataatttccatttacttcaattctatttcactcttatttacttttcgatttggattttgtatttcgctttcgaattctccctcgcattctctcattctcttcccatgacatattaaatgacttgaatttaaatctacagtacaccaatagttggaattctgccgctccaatggctactgtatacagtaaaacaatacctaccgcataaagaactaaaacatcaattccataaccattatgaaaatatatcaaaataaacaggattagcgcatatattgtagcccacttcatcacatctccttttcttttactaaaaaatgagatggatctttcatccttactaaacgcaccttcactcgcttgtttaaatgtatcaattgttgtcacaatatgaacgatagctgctcctacaaataataaccctacacaaattaaagtcattcggtcaattgaataatcagatatcccaggaagaactaacgctgtaaatgttattgtacctaattgaaatgcatataataatacaacgagcgtttggaacttttgaaatttataacgtgcttttggaaatgaatatagaattaaaaagatgaattgtaagctatataaaacaatttcagttttaacaattgttttatcaaaataagtatgataataatccaccccccccataaaaataaaaaacataaatactgaagtataaactatccctccaataaagaaaaccatagcaccctcaggacttaaacgatcattacatgtcatcctaaacttatctaaatcttcttcttttatattccacatcctggctcttcaccttctatacgtttcaattatttttcaaacactaaaattctattaatatattatttatttttcattttgaatttcttattttgttttcaaattctcccacgcattctctcattctctgcccatgacatattaaatgacttgaatttaaatctacagtacgccaatagttggaattctgccactccaattgcaaccgcatacattaaaacagttcctactccatacataacaaaaaaatcaattgaataatcattttgaaaatacatcaaaataagtagtattaatacatatattatagcccccttaatcatagctccttttgtcttactaaaaaaagaggtggatctttcaccactactaaacgcaccttcacttgcttgtttaaatgtatctagcgttgctacaatatgaataataactgcccctacaaatagtagccaagtatacatcctaccagttgaattgtcagccatttcagagacaatcgaaactacaaataatatcgttccaagctgaaacgcatataataatataacgagcgtttgtaacttttgaaatttaaaacatgctttcggaaatagatatataattaaaaatataatttgaatactaaataacacaatttcagttttaacaatagttctgtcaaaaaaaatattgtagtaattcaaatcccctacaaaaataataaacatacatattgaaatataaaatattgttccaaacataaaacccgcagcaccttcagaacttaaacgaccttgacatgtcattcgaaacttgtctaaatcttcttcttttatgttccacattcagtttttcaccttctatacagtttaaataattttcattcactaaaatcccattacattcttaacatttttaagtacataaatctttgtacaactaaattcacataatcttttaggtatattattaccatattacttaccataatcatctaatcagaatgccttttgatggttcaagtagtgttctttttcctcaaaagttccaaatattcttctttcaattaagtataaccgtcttcttgtcaccttcatccaatgcctttattagactctcatactctattttgatttaccaaaactatacgcgctcagtaaaacataactgttatcacaataactattttttactacccttttactcatatcttcacaacatttatcgttctcaaaattcaattaaaatatattatttttgatttatatactctttttcataatttacatattcttttttggaactttgattattatcttccctggtatgataatatgttgaaatctcttgattgcgttttataagcttatcttcttttttttcttcataatttaccgatattgttatttgtgttattctcatttgattttcttttgtattattaggcgtattaaattcaatcatcaatattgcagaatcaaatttatcatattttaaatttaacttatcattcatgatgtttttaaactgtaattcagttaaatcatagcttattatgctcggttcactagatctttttgtatcttcactcggtttcaatttactaagttcatttaatcctctaaacattaattttacatatgaaacattcatagcttgatcctgggctactgaacgggatttttcattttttaaatttgtactatagaccgtttcttttttgtaattttgattactaccaacgtttttatcattttttatatcagtaacaaccttttgagttgttttcccatataagtcgtcttctttcacattatatactccatgggttgtttgatatattatcctgctatgttcaccatcttctttttcttcataagtactgtcgctagtctcttctttcacatatgcatacccatcatcactcgcagacataaccgtcttcatatcaccttcatccaatgcctttactaatctctcatactctatttttgtttccccgaaactgcacgcgcttagtaaaaacgttacagtcattacaataactattttttcaactaaccttttactcataccataactacacctttccccttattttatacattacttgctattcgaatattgtttttcatacttctcatatcgggttttagaagctttatcgttatcttctttactatttaaatagattgctattttttgatcatgccttattaatcggccttctttattctttttttcatatcccattgtgatgcttattgtagtgaattccattggattttcttttgaatctttcgccgaactaaattccattaataatattgcttcatcaaatttatcgtagtccacctttaacttatcattaattatttcttgaaattccgattcggttaagtaatatgttaccttggatgactcactaaatctttttttatcttttttgggtcttaaactatctattccctttaatctattaaatataaatcgaacattcgaaacatccaaattttgatctggactttttgattgattatcttcatatttaatactagttctatatacaatctcttcttttttttgctcactatttaatgaactagcaatttcttgcaaagttgttccatagaactttttttctttaatattgtatactcctcctgttgtttgatatacaacgctaatgcgattatcattttccgcccaaaacgtgctatccctaacctcttctttcacataagcatacccatcatcactcgcagacataaccgtcttcatatcaccttcatccaatgcctttactaatctctcatactctatattcgtctccccaaaaccacatccacttaataaatttgctattattgacagaactatcatcatcttggctttcttctttaacttcatactgacaccccgttgatttctctaggcatttttaagttcattatgttcctttttggaaagtaatacatctcacctttacttactgatatttacttactcgtacagattatattgaagatgctttaatttttaatagcattgatttatatacaatcctcaattgcttatatattctattcgaattttcagaaaccaaaacttattttatttctttcgctttcttttcctccctctctttataacgctttaagaattcctgacgttccctttcatgctcctcccacgaaatataaaatgatggaaatttaaatctacaataggctaataattggaactctgctgcacctatggctactgtgtacattattaaagttcctcccgcatacaatccaaaaatcttcagtgtataatcattatgcacataaattaaaatgagaagagttaacacataaattagagcacacttaattgcaatcctctttgttttactaaaaaatgatgaggattcttctcccgtattaaatgcccctttacttgcctgtctaaaagtatcaatagtcgctaaaatatgtaatatgactgcacctaaaaataataacccaacatacattaatgtaatttgatcaattgaataatttgacattcccgggattatcaacattgtaaatgtaatagtacctagctgaaacgcatataacagtaccacaagtgtttgtagtttctgaaatttaaatggcatcttaggaaacagataaataattaaaaaaattacttgaagactataaagcactaactcaaggctaacaattattttatcaaagagagtcgggtaataactccaaccaaaccttattaaccctacaataagaaaaaacattattaatgaaataaaaaacatcgttccaaacataaaccctgtagcccagtcgggacttaagcggttcttacaagtacttttaaattcatttaaatcttcttcttttatattccacatataattacaccatcttttctaaaatcatgtaataactctatttttgtagacaaactgaaagtaaataaatgtttttagtatttcatattaaactagccttttttactttttttaacaaacacaaaatacagcgatagcattagtattaagcctattccacaaaccaatacacctccatattctttctggtataaaaaaataaacatagtaacaatatagctcggtattgacaaaataatgagccacttccccagaaactctgctattttatatagaattaaaaagataaacataatcccaacaataataggtgctattacaccttcaaaaaaacctttttctttttttacggctttagaatctttattcaagatcttacattcctccctttactagttaatttatgaataatgtattcattctatcttcaatataagtttacgagtatcatttacaactttcatttcagtttttgtttcgcttttgttctttctctcttattctttttctatttgctataaattcttggcgttccttttcatgttgttcccatgtaatattaaatgatggaaatttaaagcgacaatataccaataggacgaattctgctgatactacagcaaatgtatataatattattgtttgtgtcacataaattgccatttcatcaaatgcataattaaggtttaggaaaattaatataagcaaaactattacacaacttatcatcccaattaataaatataatttcatgttagtaaaaaacgagacagccggtcctttcaatttatatcctccatgctttgcttttctaaaaacatcgatcgttgctacaatgtgagtacacattgcacctaaaagtattaaaccaacataaaccagtgttttattatcacatggaaaatcaaagatttcttcaaccaccatagccataaatggtaatgttgctaactgaaaagaataaaatacggtcacaatggtttggagtttctgtaatttaaaagcgagctttttaggcatgaataacattaaaaaaatgaactccaaaacatacaattccacttcagtttgtacaactatcttctcaaaaggagttaaagaaatcttatcaccatttagcaaaagaattaaaaacataataagtatgggtatagaagtatatgcaaaaactcccccataaaagattcttatataatccggacttaatcgatttctattttcaatttcaaaaagacccatatcttcttctcttatattccacattcagttttttcaccttctatatagtttaaataattctcatacacttaaattctatttcacccttatttacttttcgttttgaattttttattttgttttcgagttctcccacgcattctctcattttcttcccaagtcatattaaatgatttaaatttgaatctacagtacaccaatagctggaattctgctgcaccaacggctactgtatatagtaaaacagtacctattacatatccaataaaagtatcaaacgtataatcattatgaaaataaatcaaaataagtaggattaatgcgtatattgaagccactttcatcatagtctcttttgttttactaaaaaaggaagaggatctttcattcatactaaatgcaccttcacttgcctgtttaaacgtatcaatcgttgtcacaatatgaacaatcactgctcctaaaaataagaaacctacatatactaatgtaattccgtcgattgtataatcagacattccaggaagaatcagagctgtgaataatattgtacctaattgaaatgcatataataatacgacaatcgtttggaactcttgaaatttaaatcgagcttttggaaatgaatatagaattaaaaaaattatttgcaagctatatagcacaagttcaattttaacaattgttttctcaaataaactagtatagtagtcccaaccaaaggttactaaagtaccaataagaaaaaacatcataactgaaacgtacactattgttcctatcataaaacctaaagcaccctcaggacttaaacggctgctacatgttactcgaaatccatctaaatcttcttcttttatgttccacattcagtttttcaccttctatacagtttaaataattttcattcactaaaatcccattacattcctaatttttcaagtacattcatctttgtgtaactaaatttagataatcttttatgtatatcatcactacattaattaccgtacataatcagaatgcttttgatagttcaaatagccttctttctcctcaaaagctctaaatattcttctctctttcacttaagcatattcctcatactctatttttgtttcccccgaaactgcactcacttagtaaaaacgttactgtcatcacaattgtatcgagataatatagctttaattttatcttcagaaaggtgataacctcccatcaacaatatgctaggaggttattacagttatttaaaatttgttttttattttaatggattcgatttttgcaaataataatgttatttaatttgagagaagcgaatactaaaaacatactgcttaataactcgtaattaagtcttcaccctcatatctagggtctttctcaactttaccatcttttgttttgatgacttttagtctacctaaccactctgctccgttatatgtctcttcacttacccatacattatgctttttaccatctacctcaactactagtgtggggtgtgtaaatataaattcctcctctacgtgcctacctacaatttctgcatttaacgatgtaccttcttcaactagtttactattttgatacccttcgataataggtaatccaataaatacaaagaatatgagtccaaatacgattactttcttctttgtactccatttattcttttctttcaattccttctgtctcgcttctctttcttcgcgttcatccaaactctcatttaaagcatcttcccatgccttaatttccgcttcgatttctgcttcagctcttgctagtttttctaattgttcatcggttgctaccatctcatatgacttatctccaaccaaacgaatttcagcaccattttcttttacttttcgcaagtctttttctgtacaattaaactctcgaatgatttccccttgtgtgtttaccagtctaacgtaaatgctttttttctccttcttcttaaacatctgaactcccccttatttgtttcctatcatagataaccctattgcaattaagataaagaaaacgataataaggaaagtcttccctttgcttacttgtgttgtagaaccttccaagacagcccatataaaatttggaaaagaagaatacctaggagaatataaaccaacttgttgctactcttctttagtggttattcttctactatcggttttatctgaactgcttcttttcttatttgtttcggtttctttttcttgcgtctatgattcattcaactgactccttttagaataactttttcctaactataaaaataccgaaatatcccattttcatcatataggataaaatgatttatttcttcacaaatagatttccaccataaaaaacagtctatgactattatttacaaatgttatttcaacttttattttattctttttctattcgctataaattcttgacgttctttttcatgttgttcccacgtaatactagatatttagattcttattcaatcaaaaatagactttcctctttccatgttggaagaggaaagtctatttatttctaaatatattatagcccttgttttattaataattgttacttattattttcagccttgttctttatcgtttttacaaattcatttcgccatattttaaaattatgagcaaattttccttcaatagaatttttatacccttcaaatttcacttctaaaatatcaaagtcattgaataatttatatgtctctgccgtcaaacctactgggtgtaataccccaccataatcatagaaagtgtcttcatcgagaagtattcctcttgtagtaattacatactctacatctttttcttcctcagtactcaacctcactacacttcctaaaggcaaaactttctccatataatctttcatattaattcaccgatccttttaatacgataattttctcttctattttttgtcgccttttttctaattggcggatacgatcaataaaagcatcacgtgttttaccttgcaaactattatcaatactactttctaatcttctaatatctcctgtcaaagatacagctgctttttcaagttgcataacaacgttaataatttgatctcgcccaccactgtccggaaatgtactatgaaccctcgacattatcatatgtaaatccatcctcatacccccttccttaacatttatcaataataagaaaccgaagctaactcttcatcttttgctatcatagaaattaccgcatctgttacatcttgacttaactcttttaaatcatttgaaagttcgttcacatctctggaaatctctactaataatgaacgatttaatcctctactaccatcattcataaaatagtttaataatgattggcgatggcttcttacataatctccagcaattgaagcaatatttgtatcaatttcaaagtcacctttaaatacatctaaaatatcttgaacaagagaagatgctacttcttttgcaattgctataatttcatcacgggataaataaagaatgatgcatcctactaaaaaatctacagctgcgttaaatactgattctaacacttcaagtaccttttccttacattttgctaatttattctctatccaatccacagccgcattcacctgatttctaacttcttgtataacttccttactaaatttcaaagctttttttcctgtttctacacctatacttgctatttttgttgctagagcactagtatctcccactactgttattgcaactagaattgcactgactggggttccatttaccactaaatccactacaacttcttctgttgtacttaatgttttttttccagtgattcctttatataggtccccagcagattctgatatttctaaaaaaccaaatttccaatcaaatcctgtttcgctaacctttttcaatttatctattgctacattcccattcctagaataaaattttggatcatataaaaaagaatgcccttccccattttccattttataaacctgtccaggtattacaaaatctgcggccttaatggcgccatacaaaggatcatattcatttataagactgcggcaatttttcatattggtcccgtatccgtacttaaccacatctttatttaaaacaggcgcaggatttaaagctaatacgtttatattatcttcttgatgtcttaatgcaactgtattcgctgctccgccacctaaggagtgccctagtaaagttatcttctttcctttattcttcgccttgactttttcataaaatttttctgcttgactatactgaaattccgctaatgaccccaatataggtgaattagttaaattatgtagcccaattgctccatcggttgctaaatcacctatttggctcggttgggttccaacgtatacaatgaaaatttcatgcgtgtttctatcctctaaagcatatgccccaaatccagttactgaatgaatatcatcagaagctataagattagcattaaagttgtcttgtaacttctgtttatttattattggatcagaattattatattttttttcttgtgcattataatcataaatatcttttgccgataatcttaattttcctacatcactacttaatttataatcttcctcattcaccatattctcccccttatatattaatggctttctttaaatttcttttcatattgtaagtaatctttttttgatttccgattattttcttctttattatgtaaatatgttgttatttcttgatcatgcctaatcatattattttcttcatttctttgtttatagcctatcgaaattgttatctctgttatttccatcggattttcctttgtatccttagcagaattaaattcaattagtagtgttgcataactaaacttctcatactctaatcctaaattcccattaaatatctctttaaattgaatttctgataaattatagcttatcgtagctggttggctgaagctttttttattcacatttggtttcaattcttttattccttgcactctattaagcattaattttatattagacatatctttccctcgatttgaagcttctagctgtccattttcgtatcttatatctgacttgaatacaacttcttctttatattgtgggttgtcactatgtttttcatcctcaactggagtattgactttcttttgtgcctcaccaaaaagaatattatctttaatactataaataccttgcgttgtttgataaactactcctatttgcttattattatcctcaataaaagtgctatccctaacctcttctttcacataagcatacccatcatcacttgcagacataacagtcttcatgtccccttcatccaatgcctttactaatctctcatactctatctttgtctccccaaaaccacatccacttaataaacttgccactattgacacgactatcatcaccttagctttcttctttaatttcatactgtcacctcgttagttactctaggcatttttagtttcattatgttccctttttgatagtaatacacttcatctttacctaatggcgcttcgttgcttatatattttatgttgaagatactttgatcatttaatggcattgcgataattgctgctgttagcttacttctcattttcataggtagagcttcacgatttcggtccatgtagtcgtggtgacctgctaatacaaagtaaatgcctactgtacgagatagatcaattaaagttgctgcatcctccatttctaaataaacaaatttactaaactcttcaacatttgtcatgataatgagttgttttgtgaatgcaggaatttctctaccttcttgtcttgcttgcgctaattcaagagctcgttcgcgaattacttccatccaatacttcgcatgcatattgatttcattttcgtctacaatgtagtgcgtcacattatctttatattgaacgaaactatactctgctgtatccactaacgtcacactttcaaaataatctttattcaattgagataggatgctagatacaatttgttttctcatactatcatctacactataaatcattaaatgatcattccctgcaatatcatgagctacaacttctacgtttgcaaaatcaagccccattggaattcttgctgcttgtagggcttttgtaacctctttatttttacgataagtagcaatatcaataatttctggcatcattggaattgccttcggacgttctccatcccattctcggtccatatcatttgcttcttgttgtaataattgaatttgctgtaattcatcttctgctttcgtaggtaatgcaacctggaataatgtaggagattctagttttattaacgctcttcctgctgtttcttccacttttatatcagatctccctacaatactagctacttcactttgatcaatcatatatagacaagtttgaattttaatattattgtacaattgaattctaagtgcattttgtcgccctgcactaattaaggtatgaattcctaaacttgcaccatctcggacaatttgcataattagcatttcaaagctttcatagaacttcgcttcttttactgcatcataattgtcgatcgcaataataatatgtggtatttctttcccacttgccttttcatacatttcaatatttgcaacgtcatattcacttaataatcgtttacgatttttcatttcttgagttaatctttcaacaaactttaaacatttttcagattcatcaatcgtaatcgtatccgctacatgaggtaatccttttaaaggtagaagaccatttgttccaaggtccactaaatacacatgcaaatgctccggactatgctggcgagctacatccataatgactgattgtaagaatgttgattttccgtagcctggacttgagaagaccgctacgtgtccgtctttactaatatctaatgttaatggtgtttgtgattgtaattcaggctgatctagtagaccaactgttgcttgtaatggtttcttttctttcgtccatgcttctttgaactgaatagcgtgtaagtcttgtaaatatacgctttctggaagtggtggtaaccacggtctagctaacgcttcaatttcatttatttctgcgtaatcgtgaatgtagtcaataacagcatccagttcagatggtacgcttattacttctttactgctaccaagtccacttaagtcttcacttaatatttcatattgtcctagatcatttattgcatagattgttgcgtctaaatgttctttatcctctttgttttctacatagtctgctccgctccaagctgattggaatagttcataaatttcattattcccaacttgtaagtaagcacgtcctggtaatgtaatttcagcagcatctggtgtttttaaaatttcattactatctgatgtattttgcacttttaatgctagtttgaatttcgagttactccaaatttgatcatctacaacaccactcggtttttgcgtagctaatattaaatggattccgagcgaacgaccgatacgcgctgttgaaactaactctttcataaattctggttgttctgacttcagttccgcgaattcatcactaattaaaaatagatgcggcatcggttcacttactaagccttctttatacagtttttgatactgattaatatggtttacatcattttccccaaataagcgttgtcttttttgcaattcagctttaattgatgcgagcgctctcatactttgtgctccatctaagttcgtaattgttcctaataaatgcggtaagtttttgaataaattcgccattccgccgcctttatagtcaattagtaaaaaggctacttcgtacgggtggaaattgactgctagagataaaatatacgattgtataatttccgatttacctgaaccggttgtacctgctattaatccgtgtggtccgtgtgctttttcgtgtaagtttaagtttacgatatcttctttaccacgtaatccaagtggtacagctaaagatttatgcgctgcatttttctcccaacgacttgtgatattcagttcttttactttttcaacgccgtacatttctaaaaatgttacgctttctggaatactattttttaagttttgcaaatgatttaatggtgctaatgcccgtgaaatatcttctaaattgaaccctttcggtacgtgatttagtttaaattgacggttaacaagctctccttgctctaagatgatgttcccttgttttgcatctcttatatctattaccgttttcacatgctccggtaaactttgcataacatcttgtacaaatacaagtgatacacctaattgactcggatcatcattaaagaattccataacaacatggtctaatattagtttttcatctgtaatgagaacgacatagtgcggtgcaaagtacattttttcattagtagaacttttttcatctagttttaattttcgttctttcaatatttgatacaaactatttaacacttgatcacggctacgatcatggtatacaaatccacgtacatttatatcgcgaacacttccatgaggtaaccagcgcatccaatcccatttttctttttcttcttccggaaaaatagtaataaactgcaagtcataataactatggaataaagccgtttgtgcaactaataattgtaattgctctaacactaaagagcgttggccaatataaccgactggtccattcattaaatctgttacaactggtacatcttccaatgatagataacgctgtcttagttcacgtgctatatcgattaattcatctttcgtttgactaaattcttcttcattaaattgaatttcaaaactcgtattagcttgtcctgttccaacgctaaatgttaagaaatcatgatgtaacattgttttttcataaattctaggatttacttgaactgccatattacgtattacttctacatttggattgtgataatgtaatgcgtgacgctgtttttcactttctgcatgtaaatctttcgttttttgttttatatactctctatagcttttatctcgttcaacaatgtcgactttatattgcttcaaatttttaatatacgatgtgacagaaacaatgattgttactaatgtcatcgcaatcgatgcgataataaacattccatatttcatgaaaatagcaagtaatacagttacgacaatcatgacaagtgaaggtgcaatgattcttgctaaatgctccgttggttttgatggcatacttgaaggctttgcaattgtcattttctcttctggttcacggtaaataatacgtggtgaacgatgatagtctggataaccactttgataattcgtttctgattctactaaaataggtaacgcagatttcactttatcttctgaagaaagtacttgaatgtcttcactaccaatctccaataaaataccatcaaaatataatacgtctcctgattccaacataacgctatcttttaacttcgtataattatgaaatacatccccgccatacacgttcactttaaaagaatcgtacaacgtttcgcgagatagcattaaatctacactagtcccggtaatagaaatatcatcgtaatcgttttgactcactgtaagagaatgtttcgttccaatatcaaacactttagttgtgccaacaatagatataaagattttcaagctcacatctcttgttttcccaatctcaatttccttattgaattctattaattgatcctgtaccatccaagcatttacttcattattccactttaactctacttcttgttctaaacttggattcgtaatatcatttgtccactcttttccaatcgacactattgattgctcatttggatgtaatgtgcacttatatattttgtctccataagtcaatactaatagttgctccatccgtgttcactgctccttttcaactgtctcatcaagtgcttactcttttttctctgtgtccgacaaatttttatcgtttgatgaattgccatatttctttttatattcatctaattgttgctcatatgtttttaacttttgatcacgttcttcccctgataaatccggattatttttcagtgattcaatttgtttaacaaggccgtacataataagctgaggatcatcaagtgtcttagctaaatctaatgatttatcaaaattaccttttccgttatacatccaatacagcaaatacttttcatcacttttcaaactaatgtttttcataatcgatttcttttgagcttcacctagtttttcagctgtaatgtatgcaaatgctaactcatatttagatgcaatcggtaatgattcaaactcctcttcattcaattgcgtaatgactttgtcataatcagttgctatgaaacttgcatttgcttctaacaatttattttgataaggaaattttataaaagtgaaatatattaaaggagcagctaaaataactgtcgccgctatgaaggaaaaagctaagtatttaaatgatttatagctttttttaggtactaactgcatatttttttctgtttttgtttgttccttctcaaagctgtcatcaagaaactgcagtaatgcatctaagctttccatttgagcaacggtctgttcaaatgttgtttcttttgcatcttttagtaacccagcatacaaatcatcaaagttatgtttttgggagaataaagcaataattagacacttatattgtgttaaaaattgctcttctaataatggggttggcggaacaatatctcgaattcctctatgtataatacttggtattaaattagcattaaaaactatattgtctggatgtaaaaagaacgtgattcgtttatttaaatatttacgaaactgcgcaacattccgaagtagtcttaatttctcatttcttccaaaacggctaagatcgtcccacttatataattttttatctacttgatatagaaacgtaaacatatcatccgtttcttctattgttaatagtacaaattcagatgattcgcccgtaattatatcgaattgacggaagtcttttatacgtgtttgagatttggtcatctccaatttccaattttctttttctatttgaaattgatagttcattgcatcaatttgaattattttttccgtcatgtttatcctcttctccttttctttataacccgtaataacttattttcaaataactaaaagtaaaaaatattctttataaaacttgcaaaatatctccatctgttatttggtgatcaattaaacgatcattatctgttaaaacaattgacttatttttcactttaattacaaaatgtgaaccttcatgattatcaatctttagcgtatctaataagttttttaataaatatttaatagattgatgattcggaatacgcaaatcatatgtatttccattccatttactaaaatctactgtcacattgatatgtgtttgtattgccatcactttacctccaacttttacgaagaaccgtataaataccgatgcaaataagtagaatgccgccgccaaataataatattattgttatactaattggctcttcattcattgtttcattactcgctacttcatctgcactttttctgacaatgtattcactgctaaataaactatttttcgtatctttaacactattattctcttttggttttgtaaaaagagaatctcgcaaagcttccatatctttttgttctttctttttctttttctcaatttcttcctctatatctttgttaaataactcaatcgatgctttatctaattctgtttccttatgttcctttttatttttttcttggtcgctttcttcaagtcgatccactttaaacttaatcttcccatcatcaccaagataactgtcagccgcgctccttatcggtagcgcgacaaacagtaaaaggatagagagaaatgataacttagccactatgctccattgtttgatcatttacttctttttcctcccatttcttatgccatacaaatagattactaaccaatccaataatggcaattacaaacaatacgacaaaaataactttcccagtatctttaccactaataaaatcatttagaaaactttctatatactgaagcggtgagaattgacgtatctttccgacagacgacatttgatctactttacttccaactgcctcagttaaaaataggtacatgcttaaaaatactaatagtataaacattcctaccatttttatttgtcgtaataagtaggttgagaccaatacaaacgccatcataataaatgtgatgaacgcaatccatagtaaactttgatcctgaccgaactttaaaagacgcccagaaatgatacctatactaatcccttccacaattgatataccgaaagctactactgtagttggtacattcatatcaattaatgagaatttctcttcaaaatgatctgattgcattcgtttcttttcttgattcgcaattgcgtatgctgtaaataatgcaacaatgaaacaagttaatacaattaagtacggtgtaaaagcattacctgctgcaattactccatcattttgcttttgaactggactagctaaaaagtcatatagcatctcattttgacgatctccaatacggctattcgctaaaattttcgtaaagtttttggagaatgatttatcatcttccattttcttcgtaaagtcatttaataatagatcagcttttgaaacaattgtcgttccgctgtcttgaatttcttttgcttgtccattaatttgatcaaatgttttatatacatcgtctgaagttgctaaactatgcttcgaactttcgaccaatgactgactttgcatcattaatgatttaataccagaatctaacgataaaatagctgtttgctcaccagcatgatttgttgttaatacttgctgctcttcaactagctttaagctattctcacgccatttcgctaaaccttttacatactctcctaaattttcattcatactagttgcttgttgcgtcgttccatttaatttctccgctagtagcatagaattttgatccgcactagtaatagattgttgataagagtttatttttttgttttaaacctgacatatcttgctttatttctgtagtaatacttgatgaaacaagatttgaaattaaatcaattaaactttgtttatttaatacgtagtacaaagattgatccgtcgcaattgcatctaaacttccctcttctaacttaggacctacatctttcgttcttaaatcaatcccataatacatttcgtaaaggctcattaaaccttgataactttcgactgtatctactgcttcttttattaatacactagatatattttttgttaatacttctgctttttgatgtactacttgattcgttgtactttcagtaactttaccgttatctgttcccgtttcgcctcctggatttcctccggttccgttgtctgttcccgttccgcctcctgggtttcctccggttccgttgtctgttcccgttccgcctcctgggtttcctccagtttcgttatctttccctgttccgcctcctgggtttcctccagttccgttatctgttcccgttccgcctcctgggtttcctccagttccgttatctttccctgttccgcctccttggcttccttcattattgcctgttgtgttttccatttttttgataataggcgttttagcattgtgtactaacggcattatgccatactgtgatttatgaaccacattttccaccttgctattttccgtttgtgttcctttatcttctttgttaggtttttctttttcaggactagtttcttttttatgagtcccactcaattcccactgccacattacaggagagaaaacatctatattgatgtttggatcttttaacttcacatgcagatcaatctttatatccccttcattacgaggagctattgtaatttctcctgcttcgctttgaagaaaatcacttgtacgatcctcaccatcaatatgtaagaatcctgtacttccatctagtttaaattcttctggaatctttatcttcaaaatttgcggagattccattttaattactttcgcagtatcactaaatgtaattccctctgtataaagtctatcctttacttctttaatagcgtttcctaaagatattttatttacaggatcataataaaaattattttctttattatatttttttgtaaattgaattacattttgcagttgtaatttcgttgtatctggcaaatcactttgaccgatttcttccatgtttaaactaggtaatttcgcaattaaattctcgatttgtttctttattcgagcatctggttgtttcattaatgtatttatgaagatttcttgctttccatcattcgacatagattgctttaacttcttaattaccgtctcttgaatatcactttctaactttcctgcaagttctgtatcatattcagatacttgtttttttacatctgctaaatatttttgaatcgctgcagcatcagttaaaatattcggttctttctctgaaaacgtaaattgatttgaaataattttattagcggattccaatgcacttaattgctttaaagcatcgcctgtattcatatcattcatatattgattgaattgatttgtgaaattattcgctaacaaattgttatcagtttgcattttttgaaagttattaaaaccatctaagtacgtactgttagatttattcccttcatctaacgcttgaccgaaaccttttaaaacatcctgaaatcctttgaaactattaacagaaacacctgtataatcttgtactgttttaaattgatttgtgtaatttgctaacggactatgtatatcttttttatacatagttgtttgaacgtttcctttttcaattattttacctatattatcttgtgcaccttgtagcttaccgataatactcgcaaaataaacgtcgattatttgcttattgaaatcttctaaaataacagaagctgtattttctgcctcagctttcaaatccttattcccagttgcatttactttgtagtttaacgttaatttctctggaatctctgaatcaatcgcaactgccttcctagaaaaatcatttggaataacaatcatcatattgtaattattatttttcaatccattttccgctaccccgcggctaactacgtaccattcttgtttcgtatttttatttacatttttaacaaattgatctccaaacgctattttattgccctcaaatacagtgccctgatcttcatttaccaacgcaactgtcatttttggtgtagtattctcattagctttcttaacattttgatttaatgctaaataggagacccctgttgatagtacaagagctaaaataataaacaacaagatgctccatttgaactttttcactacttatcactcctgcgactgcgagtctatctaatgaaagacttcgtatcttactctagttttaaagtaatttagccatacaacgtatggttgcatggctaaattatatatttctgtttatctgtcttattgtagaccgaaattacgagaaagatcttcgtcatgtctagcaacagcttctgcagttttattaagctgcatattaatttcttgtaatagctgtgcgaagttttgtacttttggctttaattgattgaactgttggtcaaaaccttcgaaagcacgaccttcccattctcctcttaattcattttgtaagttttgtagttgacgtaaaatgtcctcaatttgatttgcactttgtccatatcgagtcgctttcgatttaagctcctctggtgacatacgaatttgtcctgccattattaaatcccccttaaaattaaaaaatagtaaaattaaccaataatcaattctacaaattgattatatcaataatttaaaaatttctaaacaaaaaaatgatatttttccaaaatttctcttttactataataacgatatattgtataatactaatttatttgttttttaagcacactctataaatctactataaaataaaggcaaaccatctattttatacttattcgctttaaattccagcgataaagtagccactaaatcattattttctcttctctcattcagactattctactcacttcaaagtcataattacctgcctttcaacaaacccaaactcttcgtacatcttttttgcaaaattcccagtaaatacattcaacctaatttctgaatattcctcctttaattccttaataccagcttccatcagttcacgcgataatcctctcccgcgatattctgggaaaacgtacaattcatatataaatccaagtttttcacgagaaaaatagtctgtattttcccctattaatatccatcccattactttatttgcttctttaatgattaaataatacgctcctttttctacaatcggctttgtaatttcaatcgctttctctgtacttaattgacaatttcctctcgtcccttcaaaaagcgattgagccgtatattttaatatttcattggtatcttcttgattcgccttaattatcatttttcacaactccccttgaataataggcattactatcgcttgttcaagattctccgcttccataacaattgccgttaatccttgttctgtacttgtttcatgaagctctcccttctcccaaaacacagcttgtcccgcctctacctttatcttttttttatttgccccacatacatatcctgctccgtccacaataagaagcagttgagatacaactgcttcatgattaccgatgattccattctcgtgtaaatgcatagcaccgatatgtatattccctctatggtttactattttcgacatgatgaaattagattgaaatactgataggtgctttcctactttttcactaaaatcaaaaattttcattgctagtcctccttatacatataaaaccatccttactgtctgcatcatatgtccttcaaagtcttcttcaaattgctctaattcagcaaaacctttcgcttcataaaagcgttttcctttttcatttgctgcttctacatgtatgtacaatttacgtatcccatttaattccttaatccctctttgtaataaagcacttccaatcccttttccttgctgatctggtaacaaataaatcgcacctaattccgcttcattttgtagtctaacaggtgaaaagttcgcaaaccctattacttctccttcttcttccgcaacgaataaatgcgtatttttaagacgatatttcattttttcatcagaatatgcctcgtctaaaaaactgtcttgaatttctcttggaataatgccttcatatgtatcatgccaagctatttttgctactgattgtacagcatgaatgtcttcttgcttcatttctctaattatatatgtcatctcgatgtctccattctctttaaattatattctgctaatatactagaagaaacggcaaaaccattttcataattcaccttaattaattttaatttctcaattgaagctgttgcaaaatcaaactttccataaatatattccattacacttaaaaactgctttgtatgtaatctatttgcaattgtacaatgcggaacccattttcccggtacgtaatatgaattggggttgtcatgaaaagttttaaaataatcatgataagaataatgaagttttaacaattcatcggtaacggtcggcgctagaaagaccgttccattagtaggaaaaattccaacagaaagaaaagttactgcgtccatattttcttgaatagctacaaactcccctagtttctcagtatacaaatgaacatctaactcattataatccgcaatcgttatatgaggttctactccagctagttgatttgttccaattacatttgttaattcattttgcagttctgtaattttattagtaaacacacgatcaaatgtagcaataatagcgtacaatctttctcaccccttcgttacacatagcgcttcccattcttcacgaatcatgcccattcgaatagaatcatagtatgttccgttataataacgacactttcgcattctaccttctaagctcattcctattttctccgctactttcatcattcgttcattaccagaccaagtcgtgattcctactctaccaatctccattttttcaaatagcaaatctctatataatgtcaatgtttctgtaccgtatccaccattccagtatgttgggtcataaatcacaagccccatctctaaccaacgcgtcggtttgtattcccaataaaacccaactgtcccaatgatttgaccgttattttctataattaaattggatagcggttcttcttttaaacgagtttgcatcttttccttataggatgagtattcttgcattgaaaacggaaaatacggtgcatcccattttttccattctggattttcttctttaaacacgagattccataatgtttttatatctgattcttcaattgtacgaattgttactttatccccttttactattacgctattcataatttcctcctacactcctctttatttcatatataattataatattttttctgaaaaatcaaaacaaatatcatttattatattgtataattttgttataaggtacgaattattcatgtagaaagctggtgattcaatgaataaacgatttagtattgctttatttcttactattgttacgacaaatattattctctatttcttcttaccattaagtattgttacgaaatgggactttaatggaacgcctacatcaacaatggataaaaccacttttgtaatcgtaaatataattatatgttccttcttattctttgtatttttagctttatctaaagcagcgagtaaccagaaatttctccattggatcggcaacacaatgttactattcttattttttgtcgatattgtcatcgccctcatcgctcttggcttttcacttcctcttgatcatttcatatttttagcattagggcttttatttatattaataggttatttcagttccaaaattgatacgactaaatcaaccgtttcattagaatggaatgataagcaccttgaaaaaagagcttcaaatattagtagtatttcaatgatgatagcaggtatttttttagcgatacttccttttatcgtttctgctccctatagaggttatgctatactagcaattcttttaggaatgacgcttatcattctgccaagtacgatttatttacttattaaagacagcaagcaatctactcctttaaaaaaataggaggttatatccctcctatttcagcttaatgttttatttttcactttttctatctcaactaaaatccctttctctatccaaccctctacgccatcttttttaattaaatcatatcctgaacagctatcatcaatgagagaaacgatatctcccttcctaacgcttatttgcgcacaagaaatatcggttttcactgtatattcacctgacttaagttgtttcatatattcattttttacagtgagcacattattcgtttccttttgtttacatacggtgtaatcttgcatcttctcgataggctctatgtaataatacggatatgtcactccgccctgcatttctgaattcgcattaaaatccgctattacttcgtactctggaaaatagtctacatatgtataagaaaacgtatcgcccgtttgtttcctctgaataataaatacgtttaattgccctgcttctttaattgcatttcctccatcaattgcaataatttctttctccttatcaataactggattattagacggtgcttcttcagaatagttcacgacaggccaatgaccgactattacatacttatttgctttatgtgattgattgaaaaactccggcattgctatcgcatttttgcgctcagtttctttccaatctactctatcttctagaccggcatgcacaaaaatataatcttctgtttcaatcgctgttggcaactctgttagccaatatagttcttgtgaaaattcacttaacaatgcttctttcacttcacgaattgaagtgccctcatgaactgaaaaaaccaattgctctagccattcattaaaaattgaatgcttcctcgtacataaataattaataagaccaggattttcatttagaagagcatcaactaaaacttcacaattcccttcaacaacgtgaacctttgaattgttctttacaagattcataacgtagtttactacgcctacgctatctcgtcctttctcgcaaagatctccattaataattaaataatcttcatctttaaagttaactttatgtagtgcttcttttaaaagatttaattctccatgaatatcagatatgacaataactctagcatcattagggattgatagtttctttatttttttcaagtataagcgctccaatcatcctctttattaaattaaaacaattcgacaaaatacactatataaccttttcaagtacatataccataacttacaacctatttacggttcaataataacttaaaaaataagaagaagctgttcccaacttttgcaggacagcttcttcttattttttataattctttataaaaagaataactcaccttatcatacccttctctttcataaaaacgatgagcatcaattcttgaaaatgctgacgtgaggacgatagactcacatccgttttcctttccccagttctctatatacgaaagtaatactttcccatgtccttttgaacgatgtgcttctgctgttacaaggtcatatacgaaaacgtgtttcttattataaaagttcgtacaaatcgctacacctgcaaggctaacaacttcatcattctcattacgcagcgaaaatagtttataattttcttctttcatatttcgaaataaagagcttgtttcctcttttgaaagtttcattcgtaattgctgtaaaacaggtaatacttcatgtaattgctcttctgttactacttctttaacattcatttttaactctcctctaactatttatttaattttctaaatgttatatcattattatagaaagtaactgcccttcacttaagtgacagtttaagtgttttttataaggccagttttaaaggagagttttatatggattttactatcccattgcaattacaaagtaacacacctatttacttgcaaatttacgaatatataaaagctgaaattatacaagggactatttctgtcggcacacgtctaccctcacacagaaatttagcatcacaacttaatattagccgcattactgttgaatcagcttatcaacaattattagctgaaggttatgtagaaagtaaaccgaaacgtggtatttttgtagcaaatttcgatattgacgttatcccaaataaaaagccaaatgcagcaaagaagacgagcaatttgatagacgaaaaatttgaatatgattgtagccaaggacttattgatcaaaatgcatttccgattacaaattggaaacgagcattacaagaatccatacttacatacgaaaatgcactatttgccaaagaagaccctcaaggtgaattcgctcttcgagaacatatatcaacatatttatatcattctcgcggtgtccattcttcacctgatcaaattgtgattggcgccggaacgcagccacttctctggctactacttcaactgcttggccctacaaaagaatacggcattgaaaaccctggatttcaccgtatacacgcaatcattaaaagctgtgatagacaaattcatcccataccattggatgaaaaaggtattgatatttctagtttatacaatacaaattccaatgtcgcatacgttacaccatcacaccaatttccactcgggattattatgcctttatctagaagattagaattgttaaagtgggctaatggttgcagcggatacattattgaagatgactatgacggagagtttcgctacgctggtaagccgattccttctttacaaagtcttgattcaaatgaacgcgttatttatatgggaactttctcaaaatcttttttaccttctttacgaatgggatatgttgttttaccaccacaccttttaaaaacatatcaagaactgcatggaattttcaaacaaacagtcgctacaatacaacaacttgcttttgctaactttatacaaagcgggaattgggaacgtcaccttaatcggagtcgtacactatataaaagaaaacatcatgcgttagtaaaatccattatgaaagaaatgggggctaatgttcaaattcttggcgaacagtccggacttcatattgttttatgtgtccataacagtatgaatgaaaatgaactgattgaatccgctaaaaaacaaagcgttaaattatacccactttctccatatgatttcgtgaatgatttacgtaaggaatcatacgtattactcggctttggtagtattccagaaaataaaattgaaacgttggctagattattaaaagacgcttggtttcctagttgcaaggaaactttttaacagtggatttaacttgtaacatgttaacaattcaacaaaataaaaaagaaggctgttccaaaataactttttggacagccttcttctagttattcacctgacctagctttccttcccggacgtttcacaccagtcgtttctgttgaataggaagcttcgattatagcggctggatctacagagagaacgagatctttcattttcggataaatgaatcggtttgtaatgcaataaatgattctcttatgctcccctaaaaaaccaccttctccatgtagatacgtaacagatagttgcaattctttcataagtaaatcgcctatttctttattcttaccagaaataatcataacgctcttaccttgattaataccatctaatataaaatcaatcatcttcgtaacaatatagaaaattgctaatgagaacatcgcttgttcgattgaaaataaaatggcaacaaagatgaaaataactgcatttactgcaagtaaaaatgtactaatcggtacattaaagtgtttattcatccaaactgctaacatttccgaaccgtcaattgctccacccattttaacaacaatcccaacaccaattccaaacagtactccaccataaagtacaattaataactcagaagtcgtaattgctggaaatggttttaaataaattaatccgagtgttgtaactacattcgcataagatgtacggataaaaaatttctttcccattacttttgcagtaaataataaaattgggatattaattcctaagaacacaccataaagcggcaatcctgcgactttatttgccataatagcaatagccgttaccccgccatctactaatccattaggtgctaaaataagctctaatgaacctgctactataattgagccaattgttaataatacgtattcaaatactttcttcattcattacccccaaaacttatatattttcttagtattattttaacgtaattttactactaattcaaaggtatcgatttatatacacaaaagtttctcctttatcgctatttttatgtaacacatgtaacgcgtaatactaaaaacacacttacaaattaaaagtaagtgtgtttttaacatctatttaatctttacgtacggcttcatttttaatttgaatatttcctcaactgccctttgatatccaccggcatttctaagcgactctcccactttacgactattctccttaaacgtcacatcatccattactttctttacagtctcacgtaacaattcagaagttaactcgttgcgattaagtcttattcctgcccctacttcagtcaatcgttttgcaacgaatggctgatctcctgttaccggaattacaactaatggaacaccgtaatataacgcttcactcgaactattcataccaccatgtgtcacgaatacatcagcatgctgtaaaacttctaattgcgggacataattatacaacttaaagtttttcgggatattttcaaattgacttatatttatcttcttaccaacgactaatacgactgtcgcatcaacatctttaaacgcttcaaaacatttttcatacaaagcaggttgttcattaaaaactgttcccatagaaatgaaaatcactttttcattttttaaatcttcggtaggaaaactccccacttcttttcgagtagcaattgatggacctacaaatttatacgattcatcaaatacctctgaacgtggctgatattcttttgaagtatatacaatcgtaatatcaccaggatggttcataatatcatacatactattacatttcattccatactgcttattccatctttccattcccgctaaacaagattgatataatggatccatttcatctacttgtctcgcttcttgctcatcatgaaaattaatgtactgattaacagcaaacgttgtacaggatgaaacgcttggtaattgtaaaatattcgctataatacgtcctactggaaaatgattatcatatattaaataatcatatttttcctcttttgtttcttctacaatttgagtaacaatacgctctgatgcttcaatcatatgagatagcatcgtcaaagggctcccaccttcatttactcgttccataatattaatttgagagagaaaattctcaaacactcggaattccgcacctgttgcttcaaccttctttctataatcttcaatacaataagaaacaactgtttcccctcgctgaattaactcacttacaacagctaaagtcggattaatatgaccttccccaggaaaatttattacgagtacatttgccataacattctctcctatccaattaatataataaaattaacaattaattatattaattaatttaagtctattataaatgaatgcattctacttcttcatgcttttctcttcattttattattgagaaatattttctatagtctacattattgtgattcacaatcttataaatgaatgcttaattttacttttactcttcatagatttaaagatacgagtcttacattcaagtattaccaccattatttttagacaattcatacaaaaatagagaaatataatatttttaatgaattttcactataaatgtaagtatgctttcaatctttttatctttatcctcataacacatcatctgttatataatgaatttatagaatttacagaaaaataagcacatgcctttaaaagtggttacgaattatgtctattcctcacttagaagaatatagacagccttatcgttatttataccgactgttatctgtgcaaggtaatgtggaattaaaaaaatggttaagtcacccatcctatttttaaatacgaatgagagggaatatacaatggatattcagaaaaagcgttctgtaacagaaagtgaaatacagcaaatgaaggatttggcttatatttgtgggcaacaagacaatcttgattactcttcagatttacatatcaactttttaaaaaatcgaaatgaagattatataaacgattttcttctttataacggtactcaattaattggcgctttaaatatgtatgatttcgaaagaccaacaaagcttgaactaataggctttgtacatcctcattttagaaaacaacgcttcggaactatccttttacaaactgcaatgaaagaaatacaaaatagggagacagatgaagctcttcttattattaatggggattctatttctgggaatgaatttgtaaaacatatgaagttaccatatttatatagtgaatatagtatggagtgcaaaacaaacgaaattcaaaaaacaacagataataatatacagcttactcttgcaccttcagaatcacttcttgatcttattaaaatttctagtaaagcttttggtgattcagtagaaaatacgactacatggttacaaaaaatgatgaattcatcttcccatcaagtttacagtgcccttattgctgaaaaagtgataggaacaattacagtttctaaacaagagcaatctactacactatcaggattcgccgttcatccttcttatcaaggtaaaggatacggaaaagatattctttgtaatatagtacatacccttattacagaaggagtttcaacaattgaattagacgtcgaaacgaaaaatatccacgctttaaaactatatacacaatgtggttttgaaattaacacgaggcatgactattataatttaattaatttttaggtgaatacatatgttaaaaaaacaatttattctaattatgatattttagcagacatctataataaacattggggacattttgttgaatactcccatccagcctcgttttacaagatgctcttccctactctcgtatattagatctttgttgcgggactggtcatctctgccggtgatagtttaatttagttgaactaaaaagtgtgtttcacaaagtttactccgtattacataacgagggtatattcgcatttgatatgaataaaaaaataaaaaaactgaatcgaaatgattcagttttttcttaatatatttacaactgcagttgtttcgtcattttctttatagacacgcggaattcttctatctagcatacatgtaacttcatagtttattgtacctaacatatccgctatttcttctactgcgatattttcttcaccttgtttaccgtagaatactacttcgtctcctacttgtactggcatcgcttttgaaacatccaacattaactgatccatacaaacacggccaataacaggtactcgaaccccattaattaacgcatagcctttattagataattgacgattataaccatcagcataaccaattggtacagtcgcaatccattcttcaccagttgttacatacgtattcccataacttacaccacgattcttcttcgcatgtttaatatgagctacttttgattttaacgacaacgcaggctgtaaagaaacgactgaatgatccacttcttttgatggatacataccgtacactcctattccaacgcgtaccatattttgaaatgtgttacttaattccattgatcccgcactatttgaactatgaatatatggtatttgaattcctaattctttcgctgtattaacagctttttcaaataaacttgtttgcatattcgtatatgatttatcgatttcatctgccgtagagtaatgcgtaaacatccctactacctctacatactccatacggtttaattcttctaaaaatggtttaacttcttcttcttgtaaaccgatacgactcattcctgtatcaattttcacttgaatttgtactttcttttgaagacggtttgcaatttcatttataccatgtaaatcttctactctataaacagtcatcataacgtcatattgaattacatcttctacagccgctactggtgtgtatcctaaaattaaaattggtacagtaattcctgcttctcttaattctattgcttcatctacaaatgcaactgcaagttgatgtattcccgcttcaattgcagctttggcaacttcaactgccccatggccatacccattcgcttttacagcagccatcatcttaatttcttcatcatttacatgttttttaaattcttttacattatgttttacagcatttaagtcaatttctacaattgtatctcttccatatttcaaactcattggtctaactcctaactcaataattgcattccattctatttcacgtttcatatgaccttttacaatataatacttttcattatgctagtcaaactactagaattttcggaattttgagtatgatataatatcctcaagaaactattatatacggagacgaggagaattacaatgtttgttcaatctgcattgcatcaactaaaagttgctattgatacttctatttatatgcttaaccaatatagtgaaaacgatttaaaaatacaaccgattcactcaaaacgatcattatttgaaatgtgtgcacatctttctcttatttgtcatgctgatttactcattttaaatggtatttcagaaaaagaattacataccttttatatagaacatacacccgtaacagttgctcacatgcaacaaacgatgattgaaggatacaaccttctctctaaaacatttctttcctactcccaaatagaattagcaaaagttatgactgcctattgggggatttcttattcgcgctttgaatggttacttgaaatcgttgcacacttttatcatcatcgtggacaaattcatattttattatgcgagcatatgaaagatcctcgcattcctttatttgagtgattttccactcattcattaattagctacaaaaccaataaaaagtatcattcctaataaaataaatgtttgagcataacctcctattttcataagataaatagaaatgataggtcctatactagtacctaaaaataaaataaaagtatattccccttgctttccctcctaattgacctccaagagaaactaaagacggaacggatatagcaatacctattacaaaacagacactcatcattacaagtagagatagatccgaaacaaagcccattgaacttagactaaaaataacaatcaacaatcctccttgaagaactttccttacttcaaacctctttgttaaaagacctgcaagtggtgacagcaacataccaaacagccctgctaagcgaaaataaaggatttgttctgcagttaaattgtaagtaggagagctcaaataattccctaaaacagtatacatattaacaaaagccattattaaaacaggatttttcacactgactaactattagttttaaataattcgcaacttctttaaggcataagaaattccgccttcactcgccttcgttgtaacgaaatcagcccttctcttcaactcctctccaccatttcccatcgcaactcctaatcctacatactgcaacatctcaatatcatttccaccatcgccaaaagcaatggcttctaatttactaatgtttaaatgttccaatactttttgaattgcagttagcttcgatactttactatcttccaatacatttataacgtaaccatgaaaacgctcaaacgtaagtgctggatatctttcaatgaatttttgagcttctgtatcatcagcatacagacatatgcaatacatctcatctgataagtttctaactttgtcaggataccgctctaaatttaaagtttcatttaacgctcgcatgacacgttcatctttggaagcaatattattcattgcaaattcttctgtaaagtaagaaacactgtgaccatctattatgtataaaactttaatttcttaaaactgcacaaaatggctatattacgcagttttgtactgcatctaattttataaatggcaacatatttctggtcatttgtgaccaaattcgttaccgaaataattcaaaattaaactaataaaaaataaaagagcacagcgtgtataaagagtgcgtcaacaccctttataccgtccgcctacaccaactaggcaaacacttgctgtaactctttatgtactttattttaccgtacgtaagggttcttccgcaacagtttgcttacattttgtggcatactgttgcttttttattttcaaaggagacgagcccttatgaaaaagaaacaagccatcaccattcttgctagtatagaaacatatgaaaacttagtatcttttcaaaatctcaaggagctaaatgacactgtacgcgcatataaagaacaatttgctgatcgattaaataaaaatcaattggctgtactcaatcacttacacacccattcttgtaaatattttggcgtttcttttaaatccaaaaagaagattgctgaagtacttcatattagccgcagaacagttattcgtgcatgccaacacttagaatcacttggtatcatcaaacaactagaaatgaaacgtaaaagtgatatgagacaaacaagtaacattattgtaatccaaccaatcttcacaaaagacgagtttgtcacagaagcccctactaaaactgtggaaatttgtcacaccaagaaaacaactactaaaaccttaaaacaaaagataaaagatataaataaacgtaaggtagattcagctgacacaacacctgaaaagaatgtacaacaagcaaattttattgcacactgggttccagaacgttttgcttctctagcctctgcttattattcaaaagcgagaactattcaagaattttggaaagtagtaaaacagtgtaattgtgtagtaaatcatacaacaggggaaactgcttttgataaagaacaagaattacatattggtgtacaggccatgaaagaatttgtgatgaaaataaaagatggagcccgcatgaaaaaaggatggttctcctatttcaatggtatcgtaaacaacttgatgaacaaatattattttgaccccgaatttggtatgtgatatcttcttttacacttcaggtaccacatatacctttgcatatacactatgctgcacagcaaattgttctagcgtcttttgcctatatggtgtgattgtaaagaagtgaacaataggaactttcccgttatatttatttttataatacaaggtgaattcaccatacttattcattttttcgctgttcacattcatcatttgtgtacgatctatttcaactgcgtttaaaatcccgtcactatcacggtactttacatctggaataatcgttctcttattttcatgcactttataacgtataggggcttctatctgccaatcttcaggacaaaatagatacaaccacgcttcgttcctcataaggctgtgtgctaatcgaatggtaggtacaaccttttctgtatcatcgaatagcgcacgtccttgtttattgaggtaatatacatgctcttttttataaacggtactattcacatatggacttaaatcttttaaaattcgatttgcatttcgaattcctcccatatcgtgaattgccattaagtgtcttcttgtcgcaaattttagctttctaatcgaggtcaaaatcatcatctgacgattcattttgatatgtgtctgcatatgcatcttttttcacctcgtattgttttaatacgtcccacatttgttcatttgagatataagggacttgaacttctgttaatcgatctgttttaaaaagcgcacgccccggtatactttcaatcaattcgagaccagtttcatcgatgacaacttgagaagccgtttgagttggtaaccgaaatcctaattttgcatcactgttttgtttgacttgacgtggtaaagtatcgccagtagggtattgcgtgcaaaaaatcaatcgaaatcctaatgctccaccaattcgcgctatatgagaaagcatctgttgacaagctcctaataacttttgttgttcccgattcatacttttatcaggacaaagttctgccccttcatccacgataataaagtagcgttctcttatatttgtttccaccacattggtataatggtgttctttcataaaaagcattttttcttccatcttttttagaatcgcccttaatacctgaaaagcttccattggcttttctgcaatcgactcaatctgttttacatttttgtatggtccgaactctaatcctccttttaaatcaataataaacaagtgcgtatattctgcttgtgcagtaataagagatgtcatcacattctttagaaatacagtctttcccatacgtgttaaaccacctaatgtcatatgtggtgttttatcaaaatcgtgataaatcaattgttctaaactttgcccgattggcacaagccattttccaactttcattaaatttttcgaccattcccacttcttcggtatttcttgatcgaatacacgaatgttcaatctataattgtcatactgaattcgaacaggtttatttaacccttcacttacaacatcttcaacctttcgaataattttacttggcataccaacaggcaactcatacacgtatgttgtacttctatcatcatgagttcgtttcttaaattttggataatgaatcttatcatcttttttgattgcaattcctgacacttcaaaaaacacttgtatcttctttttatcatctattttccttttaaaccgatcacttacgaatgcaaaagttaaagctgtcatcgggacccatagtaattccaacataaacatttctcctttagatatcctataaggatatcattgcactttattggaagcgaacaggactagcatttttgcttgtgaggtctattgtccctctcttccacatcgtattccttcatagaaacataacgagaacgtaacgtagaagatataagaacgagcccgtaagcgttgtatacatagtcatacgtggaagccaatatggaacactcttccccattttttcagctacactcatcgcaactacagacaagcctgttgccgtccaaataataacgacttctcctgcaagtgtcatagccattcctcggtcaattcatctttctcacgaaatttaatccccgatttggtagctacaatctgataccgctccattaaatcttgccaattcaatatatcttcctcttctccatataaatcttcttcaattacttgtgataagctgaaatatcctttgtactctttgttatcaaatacttcatggttcctcatgtgagtaagaattgattccgtttcttttctagatctagattcgttatacatgtgacgtagttcttttgatgaatataaataaggcgttgtattgaggtaactatactgagaacgcatgtaaccctctcctctcttgatatctacaatgccatacggaagtccaagtagaattcttcgtgggcttccgtatggaagtaatataggtatatgaaccagaaggaggattattgcctgtacacctgaaatttattttttaagaggacaaaaatgatttcactagaatatacatactaggaggtggaataatgcttcaaagtaatttaaaacaaattgtagataaaaaaggcttgcgatatggatttatagcgaagaaagtaggtatagcaaactcaacaatgactaatttgctgcaaggcggaacaccgacacttttagtagcaattagaatagctaaggttcttgatatgcgtgttgaaaatatttggattgaaaaaaataaggaggatacataatgaaatttaagcttcgtgttattttatttttagcgactatttttttagcaatcattacctttttcgcattgactactagggatgataataaaatatctaaagatgaatttaaaaacatccatcaaggaatgtctatccaggaagttcgaaaaattattggcggtgatggagaagaaaataaattaactgatactattactgaaattacatataaatcaattgacggtataaccaacggagaggttaaattttcatttaaagatgataaattattttctattggagattttgcctacgcttcatctgaaagtaaaacttatcaatctgatcaaaatcaaaactcaaataattccaatgaaagtctttccacaacaacacttcctacaaataataatttagaaaaaaggattaaggatattgtaaaatcgagcattggttcaaaatcattaacaaatttagaaatcaacaaaaatatggggacagcaactgaagatgataaaattgctatacttactatccacgcaagtgataaccttacagataatatgtttaagcaaggaatgtggatggacacacaaaaaatcttaaaaggtatagccaatgaaaaagaaataagtgagattgctttcttttggcaatttgaaacagttgatccatacggtactaagaaagttgataatgtgatgaaaataatttttaatcgcgaaacaattgataaaattaactttagtaattttatctttgaaaatatccctaaaacagcgaccacttattgggaacacccatctttaaaaaaagaataaattcaaacaaaaataagagccgtcaaatgacggcttttattttttataaaactattcttttgtagaaaatcacttcacatacacataggcttcatttgttgttacatagtatgttttgcctttactattgtgaactttatattgtggtgaaccatttacatttacttttgcatcaattgtaaatcctaatcctgcatctacagaaccagccacatctttatcctgccaagatggagcatcatagaatcgtaggttattaactttagaaacaacacgcttacctacaatagaagaatccactgtactctttttattaaacttcacataagatgggtcgttcttaatccactgctctccaccaagatttaaccaaccatccttttcagcccatacaacataagattctggtttgtttaattgacgaatcttagaatagcttgtacccggtccttttcgtaagttaacgttgtaaccttcaatataagcaataccgtctgttacagctgttggtacttctgctggtttagatggtttttcaggtacagaaacatcaacactagaattgttataagctcgttgtacatcagcacggaattgagcttctgatacgccatgagactttaagtaatcaagtggatcttcatgatctgttccgccaagatatttcgtcacatcgtagtgagtccataatcctttttccacagataaaccacgatcacgtaggattttagcaagtaacttcacatatttatcataactgcgtttgaatttatcgtaatctgctgtttcgcaaagttcaacatgtacaaagcgtttatttgctcctggtccaccaccataagcaatatactttgtatcagcaatttggattgtttcattccagtcaactgcatagtgaacaaatgcgtttctccatgtacgagactcatatttttgaatattgatagctggtgcttctggagtcgccgtagaatgagctacaactccctcataagcgccaacaccgtaacgatatggctgtttaggtaaatctggaataataagtgttctatcagcaaaagcgcttgttgcaatggataaaactaaaataaccgcaaagattacagaagaaatatgttttaatgtctttttcatttttcatcaccattccccatgattttttgtttaatatctgatacatcttttgaaagtgaaccaaatgcttttgcctgttcttcgatgaccgcttggtttttttcaatcactttttggtactgctcttcacgctgctcattctttttttgcgtagtaaaaagcatccacacgaataacgctgcgaatgctccttgttgaaccattgaattaaaaattgcatcctccactgttctcatctcctcgtatgattaagttaggtttttagggacgggatgtacctataaatccaagggttagtttgtctagcatctaaaataaaaattgacgtttcacgttgtttgtttcgttcagttttcaaagaacttgtccgccgcttcagaagcgacttcaccatattaacatcttcatttttcgatgtcaactaagttttaaaatttcttttttgtcgttttctgcgtttccgcatcagcgacgtttattaatataccatcacactttttaaataacaagtgtttttttataaaaatataaaaaaattatctaccctactttcttctatagaaataactattatcctctctactaaaaatagttattctgattgtatactactacacttcattcaaccaaattgaatttcacaataccttcccaaattttcattctcttctatattaaggtttataataattatccttctataaaataactatacaaattagccgtaagaaaaaatcccatctacattaaacagccactcgcgcgcattatccccttccttctcattcgaaaattcccccctacaaattaacaacattccaatcctaatataaacttaaggatattgttagaatttttttacatttaattaatgaaaaatatccattttttgttatatagtaagaaaggacgcactcaactataaataaaccaatggaggaattattttatggataggttaacaaagttttcattaaaaaaccgagctgccattatcatcatgatctttctcatttccatactcggtgtttattccggctctaaattacctatggaatttttaccaagtatcgacaatccggcaattaccgtcacaaccttatctcaaggactcgacgctgaaacgatgacaaaggatgtaactgatcctctcgaaaaacaatttcgcaatttagaacacgtcgacaccattacttcttctacatacgagggattatcacgtatcgacattgcgtatacatcaaaagcaaacatgaaagatgcagcacgcgaagtcgaaaaagccgtcaatacaattaaattacctaaagatgtaaccaagcccgtagttagtcaattaaacacttctatgattccactcgctcaaattactatccagaaacaaaacggtttttcaaaagcagatgaaaaacaaattgaaaaagaaatcgtaccacaactcgaaaacattgatggtgttgccaacgttatgtttttcggaaaatccacctctgaattatctatcgtacttgatccgaaccaattaaaaaacaaaaacgtaacatcacagcaggtactaactgttttacaaggaaaagaaacttctactccagctggggcaattactgttaatcaggaagaatacaacctccgcgtcattggggacataaaaaatgtaaatgacattaaaaacatcactgtggcaccccaagtgaaattgcaagacattgctcaaattgaaattaaacaacactacgatacaatctcacatataaacggagaagaaggcacaggattaatcatcatgaaagaaccgagtaaaaatgcagttgccattggaaaagagattgataaaaaagttaaagagatagataaggaatataaagatcaattttctattaaacttttggcttcaacccatgaacaagttgaaaatgctgttactagcatgggaaaagaagtaatacttggagcaattgctgcaactctaattatcttaatctttttacgtaacttccgaacaacactcatcgctgttgtcagtattccattatctattttattaacactctttttactacatcaatctaacattacgcttaacattttaaccctcggtggtttagctgttgcggttggacgtctcgtcgatgatagtatcgttgtcatcgagaatattttccgccgtttacaaaaagattctttctctaaagatatcattctcgatgcaacgaaagaagtcgcagtcgcaattacttcttctactttaacaacggtcgctgtttttttacctatcggcctcgtagcgggagcaatcggaaaattaatgttacctatggtattagcagttgtatattctatactatcatccttaatcgttgcactaacagttgttccacttatggcttttttactactcaaaaaaacaaagcatcgaaagccaaattcttcatcacgatatgtcgctacattaaagtgggctctttctcataaattcattattctacttactgcatttttattatttgtaggatcaattgcagcttatatattactaccgaaagcaaacataaaatctgaagacgacacaatgttatctattaacatgacatttccagccgattataatgctgaatctcaaaaacaaaaagcatttgattttgaaaagaaattactttctaattcagatataacagacgttattttacgaatgggatctagcgcagaagatgcacaatgggggcaaacaactaaaaataacctcgctagtatattcgtagtctttaaaaaaggttctgatattgatcaatatattaaagagttaaaaaaggaaaataaaacttttgagcctgctgaacttgattatataaaaacaagttattcaagctctggcggcggcaataacttacaatttaacgtaacagctactaacgaagcggatttaaaagaggcggctactatcgttgaaacaaaactaaaaagcatggatgatctttctaaagtaaaaacaaatttagaagactctaaaaaagaatggcaaattcatattgatcaaacaaaggctgaacaactaggtttaacaccagaaatagctgcgcaacaagtagcattccttatgaagaaatcacctattggcgaaattacaattaataatgaaaaagctactattatgatagaacacaaaaaagaaaacattaataaacaagaagatattttaaatacaaacatactatcacctattaatggaccaatacctttaaaagacatcgcaactatttcagaaaaacaaacgcaaacagaaattttccataaagacggaaaagaaacaatccaaattacagccgaagcttcaaatgaagatttgagtaaagtaaacacagcagtaaataaagcgatgactgacttagatttacctagtggtgcaaaagtaaatatcgcaggagctactgaatctatgcaagagaattttacagatttattcaaaattatggggattgcaatcgggattgtatatttaattatggttatcaccttcgggcaagcacgtgctccttttgcaatcctattctccttaccgttagctgctgtcggtggtattttaggattaatcatttcacgaacacctgttgatgtaaattccttgatcggcgcattaatgttaatcgggattgttgttacaaacgctattgtattaatagaaagagtccaacaaaatcgggaacacggaatggaaactagagaagccttacttgaagcaggttctactagactacgcccaattattatgacagctattacaacaatcgttgctatgctcccactcctatttggccaatcccaagcaggaagtatggtatcaaaaagtttagccgtcgtcgtcatcggcggtttggcagtctcaactgctcttacattagtagtcgttccagttatgtatgaactattagataaaatcgggagaaaaagacgctcccgtaggaaaataagcacttctacagaaacacctgatatttaaaaacaaaaggcgttaccttcacaaatgaagataacgccttctctctatttattcataaaatccatcattttttccacatattgctctataggtttactagaatccacaatccaaattacatctgttcttctttataattaatcacaaattcaacaatcattacatccattccttctatattaaaatacaaaagaaccccctacctataaatagagagttcttctttataatttatgccgcttttacctttttcgttgttttactttttcttttcgttcctgtaaagcgcttgtgtaatatagatgctatcaagcgtgaaataacattgaatagtaataccataataattaatacagctgcagattttgtcgcaatcaacttcgcatctggaataactccttcagaatttaatttccaaatgtgaaccgctaatgtttcagctggtctaaacggatttaaaggatgcgcaggacttgataaatccgctgctgaatttaaaatcggggatgttaaacccgctgtgtaaattaatgctgccgcttccccaaatatacgacccgccgctaaaataatccctgtaataatttgtggtaatgacgatgggataataatacgagcgattgtttgccacttcgttgcacctaatccaagacttgcctcttttacattatgaggaacttctgaaatcgcattttcacaaacacgcgttaaacctggtaaatttaaaatagttaaagcaagagcaccacccattactgtgtatccccaacctgtcattgtaacgaacactaacaaaccaaataaaccaacaacaatagaaggtaaagacgccatcgtctctatacatagacgaacaaaatttaaaaaacgtccttgttttgcgtactctgctaaatatattccagcacctaatccaagaggaatagatataataagcgttataacaagcatgtagaaggaattgaataactgcggaccaatcccaccaccagctcttgtattgcttggttctccaaacaagaaattaggatcccaaaatccccatcccttttgtaaaatttcaaatactaagaacactagcaaagctacaactaaagctgcaaccgcataaaagatacctgtccaaactttatttaccgttcttgcattcattattatcgctcacctctttgcccaatcgctcgaattactaaaataaacaggaatgaaataacaagtaaaatcatcgctaaagtccatagcgcattgttccaagcagttccgttcaatgtattcgtcatgtccattgttaaaataccagttaacgtcgctgtcggactatatattccttctggtaatttaatcgtattcccgattaccatttgaaccgctagcgcttcaccaaaagcacgcgctaaacctaaaacaacacctgttaaaatccctttcttcgcagcaggaacaattactcggctaatcgcttgccatttcgttgatcctagaccataagaagcttctaaataatcaaatggaacagaacgtattgcatcagaagcgatactagcaatagtaggtaaaatcataatacttaatacaacaatacctgcaattaagctaaagcctactcccccaaacgaatcacgtaatagtggtactaaaatcgtaacacctaataatccgtatacaaccgaaggaataccaactaacaattctagaacaggcttcaatactttatttccaaactttggcgaaattaaattcatgaatatagcaagagctatagcaattggtgcactaataataaccgcacctaacgaaaccaccgttgaacctacaatgaaaattaaagccccgaaggatccttgatcagcatttggattccattttgtcgatgttaacatctcagtaaatgagataccactttgtgtaaaagattgaatacctttcccacaaataaacgcaataatagctaatgtaattaaaacaataaaaataccacaaaacgtaacaagtgatcttcctatatattcactttttacgtaattaatttgttttttccccttcatcacaggacagaccccacttcacagattgaaatgaacaggactggccttgcagccagccccataaaattttattacttatttaatttagacattggaatgtagcccatatcttctacttgcttttcaaaatctttaccttttacataatcgatgtaagctttcgtcgcttccttcgcttcaccttttgttaccatatattcgtaagaccagaatggatatttaccagacgcaatgttttcaactttcggttcagcaccatcaattttcactgtttgtagtgcgccttttttctcgccgaccatgtaagacattgctaaataactcaccgaaccaggagtagagttaatcgcttgctctactgcaccgttagaatcttgtgttgtaccagttccatcattaattttcgcgtctttcataatcgttttttcaaatgtagcacgtgtaccagatgaagccggacgattaattacattgattttttcatcttttccgcctacttctttccagtttgttacttttccagtgaagatatcttgtacttgttgcattgttaagttatcaacttttacatctttatttacgacaagagcgaatgcaatacccgctaccttgttatctactaattctttcgccttttcagcatcttttattttatctccggacggaacatccgaattaccaatttgcactgcaccagatgctacttggttaatcccagttccactaccgccaccttgaacttgaatagaaacttttgaatttttctccatgaatttctttccagcttcctccgcaagaggtagaagagctgtagaaccagccgctgcaatcgtacctgataattcttgttttgtattatcgcttcctttagcagtttctttactagttgtatcttctgctttcccacaaccaactaatgctcctgctaccactaaagctgctaaagaaaatttaataccttttttcataaccatgtcttgtacccccatttggattatcacttttcgaattcattttctttcgaacacaaattcattgtaggacaacaatattatgtgagtgttaagcaatttttaattttaagtaaatgacgataataatccttaaaagctagaaatcccaacatttatagttaaataacccaacaaaaaccacactaactacgctgcaatgtaaatatattcttaacaatgtaaattcaatgtaaatgtttttctatctttttcccttttcgttaaagttacatttacaattccgctgtattttgtaatttttacacacctaatttatgcacattaaaaataatttcagtaatattttttagtacaactaaataaattggaacaattctaaaaataaatgaatatttttaaagtactaattgacaacataatccaatgtagtctactatattactaacaaaaagtttaccttaggaaactttttaaactcaaactaaaaatatagagatgaggtaacttttatggtatcggctaatataaaaccactttccgaatttaaaataggagagtttgtacaaattgagaagatacaattagaaggaactatgaaacgacgcttattagatttgggatttatcccgggggcgacgattaaagtattgcaacgcagtccacttggagatccggtcgcttatcaagtgagcaacacaactattgcactgcgtaaagaagaaagctcccttattttcggggtattaataggagatgatttcagatgagcaaacatcgtatcgctttagctggtaacccgaatacagggaaaagtacattatttaatactttaacaggcttaaaacaacatactggaaactggacgggaaaaactgttttaaaagctgaaggagaatatgaacataacggaagtaattatacattaatagatttaccgggaacttactcactatactcaaattccgcagacgaagaagtagcgagggattatattatatttgaaaaaccagaagtaactgtagttgttatagacgcaactgctatggaaagaaatttaaatttagcactccaggtgatggagatgacaaataatgtagtcatttgcattaacttaattgatgaagccgagaaaaaagggattgttatcgatgaaaagaaattagcaaaatcacttggtgtacctgtcgttaaaatttcagcacgtcaccgagtaggtattggtcatttgctaaatgttattgcaagagtagcaaataaaaaactaattccaacaccaattaaaattacttacagcgaaaaaattgaaaatatgattcaggaattagaaccacaaatttataaagtgttcggtgatacgtatccagcacgttggattgcgttacgtatattagatggagataaaaatttcttaactacacttcaaaaacaccataatgaaccacttgtaagggaggtcgtaattaatggaatctcactcagccagtaaaggtcttccattagactatattattcaacatgcacaaacactttcaaaagaagatatacgagatgatatagtcggagatatttaccgaacatctgcaagcatatgtaaagaatctgtccaatatacaaatactgataaattatatcgttccgaaaaactagataaaattttcacatctccaatctggggattcccaattatgctcggtattttatctattattttttatcttacaattgcaggcgctaacgtaccatctgatatgattgccgaattcttcggatgggccgaaggatatttaacatcttggttccaagcagcgcatgcacctgaatggttacatggcattttaatacttggtttgttccgtggtatcggtgctgttattagcgttatgttaccacctatggcaatctttttccctatgttcgcgctattagaaaactacggatacttaccacgtgtcgcgtttaatatggaccgcttattcaaacgatccggcgcacacgggaaacaatctttaacaatggcaatgggatttggttgtaatgcagcagccattatgtcaacacgtatcattgaatcaccacgtgaacgtatgctagcaattttaacgaacaacttcgttccttgtaacggtcgctggcctatgttaattttaatggcttcactatttatggctgctggttatacaggcagtatgcaaacattggttactgctggcgttgtagttggaatggttgtaattggtgttattatgacattaactgtttcttgggtactatcaaagacagccttaaaagggattccaactcactacacacttgagttacctccgtaccgcaagccaaaagtttggaataccattgttcgcgcaacactcgataaatcaatctatgttttaaaacgagctatagttgttgctgcccctgcggctgcattaacttggttacttgctaacatttttatcggtgacacaagcttacttatgtattttgtaaacttcctagatccatttgctaaaatgttaggacttgacgggtttattctagctgcattcattcttggactacccgctaatgaaattgtaatcccaattttattaatgtcttacttatcaactggggctttaactgaaatagatgattttaatcaaattaaaaatctattcctagaaaatggttggacttggttaacagcgttaaacacaatgttgttctcacttcttcatttcccgtgcggaacaacacttgttaatatatacaaagaaacaaaaagtgcaaaatggacattcttatcgtttgcaatccctaccgttatcgccattgttgttacattcctctctacacaattggtacattggttagggcttgtataaagcaaagcatacatagaaggtatcccccttcacatatgctttgcacgaaagaaacctgaaattattcaggtttctttttttgcacatcagtattccacggctgtgctccatacgttgtgagttttttatgaataaaatatatagttcctggaagaactgccattaatatcgtgcaactaattcctaatccagtaaacaactttcatcaccttatttcactcttttcggtaaagctgaacctgaatgttcaattgttggatgaacatgaacagtaatttcagcattactaaagtaattttcgccttgatcccaattcttacttatttttgtccactctttataattatgtcgcttatacacttcccctaactctaatacatctaccttatattttttttgaacaagcttaatcgatttttgaatacgctcctccatttcttccgatatatccttctctaaacgcttttcattcaaaacctttttatgatcactgaaatgcaactcagccaatgtgccttccagagataaatgaatatcaaactttggttttgtagcattcgttgtagatactttaatttttcgacgcaacttatgaatttcatatgtaataagttgattttttttacgaatcgtaaaaaaacctccaatttttttgcctattatataattcatccctaatgtttcttccccactcaaattgcctacacatttattatcctttccacgaaacaatgctgcaccgttcatttgtaccccttgttttgtcagttcaagaataggtaatacaaaactgcggttagagatcatcttctcctgtacctccccaattcttgcagcctcaatcatttgggcatttttcggagggtgttcagctaacatatcaatatactgcgccggtaaattttcaggcttggcactttgttttaaaatagcttctgcatttttcttagaaacgaacaaacgaatatttcttctcatttcatgatcgcgaatatatacatctaacgtattttgtaaaatgtatggatgtgaaagtaattcttcagagaaaataatcacttgtatatgagggaaaaataatgtacggctaatttttttagcgattattcttatttgttcaaatacactatctgcttttgcactaacattaatataattttcgctatccccacccccttgtccaccctgttgagacaatttactggggagtaccatctgataggtccctttcataattggattcgctttcttctccttcacgatatcgtaagccgctcctactacaaatcctctttcttctatctcttctaactcagaacacccactcataaatccagttaaagccataaccattataattttaagaaggtgtttcatttccaccattccttctttttattttatatacaattaaaacgagcaaaggtgctaacacaacacaccccatatctatccaagctaaataagtcccataacttgataaagcattcaaactactaggtatcatattcgccataaaaataattggggcacttacgaaaataaaaatatgtttcttcactttcggaaacatagcacaaaacaataaagatgcgacatcatagtacattgctgtcgtgttataaatagtaataatccaagtcgtaaaaaaaatcgcatcaaacctttctaaaaatcctccaccaatttcaatttctttccctaattcaattgttggatatgtcaatccacgtgttgtcatatacgtaaaaacactaatacaagttacataaattaaaatgtatgacagcacgtttaccatcaccgctttcgcgactgccatcggcgcttttttcgctgtcttatcattcagcaacaccgcataaaataaagctacttcaaatccaataaacgtaaaaatagaatttttaactccaacagcatattgacttactttcgtttgaaaagctggtagtaaattatttatttccattaaatttatattcaataaagaaagaagtactatcgcaattaaaacaataggtaagaataaaacatttaaccttaataaggctgctcttgatcctgctattccataaataacaactaataagaagaagaaagacagtagttgtattggtgtatcactaaataaatacgtttgagaaataactgaaatcattcgcgattcatatgctgtcaaagcagcaaacgttaatactaaaatacaactaattgtgtatgcaacaggcttcgtcaaatgcgcactcgtatattgaacaaaattttgttttggaaataagatagccactctcgtcacaaaccagcctaaaactgcgcaaatcaatccacccaaaagcaagataatccaaccgtccgaaaataaagtttggttagcgatatctctcggcatagacaatgcccctataccaataatggtcgatgataccgcaaacccaatttcccgagatccaatctcttcatcgccatactcaaatggtttcacttattttcgctcctttggacgtattgtagaatcttttgtttgtaagtactctggtctatctttcaacatcgattttggcatgcgaataaattcttctttccaatctttataaaatgcaggagcaataggagttgtatacggtataccaacacttgttaaatttgtaatatgaatagcaagtgcaatcagagctagaatgatcccatacagtccaaaagccgttgcagctaatacaaagacgaaaagtaaaattcggaacgtaatcgtaatactatatacaggaagcgagaacgtagcaatcgcagtaactgcaataataataactaaaaacggatttacaatccctgcatttaccgcagcttctccaattacaagacctcctacaatccctatcgtttgtcccattggtttgggcaatcggattccagcttctcgtattaattccatagtcaaggccatcattaacgtttcaatatatgctggaaacggaacaccttccctcgcacctgcaattgaataagccagtttagaaggaataagtccttgatgataagatacaagtgctacatacatagctggtaacaaaaccgcgattatacctgaacccatacgtaaaaatcttagtaacgttccaatcacccagcgctcgtaatgatcttctacagattgaaaaatatcaacaaacacaagcggtgcaataagagcaaacggagatccgtctactaaaatggccgcttttcccttcgctaatgacgctataatattatctggcctctctgtattcaaaaactgtggaaatggagataaattattatcctgaattaattgttcaatcgtacctgtttccaaaataacatctgtcactattgattgaagacggcgatctaactcttttacaatgtgaggattaataatatcttctatatatactagggttacttctttctgcgatcgcttccccataatataagattggaacctcaactttggatcgcgtaaactgcgtcggattaacattttattcacattaatatcttcatttaatccaactcttggtccgcgtattaaatcttctgtcactggtggctctaaacttctcttctcccaagccctactattaataacgatagcagtttgaatattatcaattaatataactgtatctcccgctaaaatcgcatttataatatccggaaacgttgtcttcttacccacttccgcaatagaaataaaatgatccaataacgtctgaacgacagccgcttcattttgcacttcttcatattgaagagtacgaactacatatttataaacattatccttgtctgttaacccacataaaaacacaaccgcacaacgtgtaaaactcccagcaagaacaacttctctaattgttaaatcattaggtgaacctaactcatccctaatttctttcataacttcaaataagttaccttcaagctctaacaatttccccacctaacttccttttcaacaagtttttagttagattccgctaattgaagaaaatatatacaaaaaagagctatctcttttcaaagatagctctaataaagtaaaactttaatcagccctcaccaatcggacttttacaggcagcagggcccctacctaacttctttgcttccgctgaattttgagttgagggtcttactgcccgttaatgcgggataaacgaattacttttctactattatattgtttttctttatagatacactttttgtaaacccactaactacaaacatcacaatcatattaattaacaatgcgactatgcctacattcaaatcttttatatactgcgggaaactcggaaacattgtggctatagttgaaccagataaggtaatatatgcgaccactaacagcccaactcctattcctgcaatcgctccttgcttcgtaataatttggcgtggaaacaagctacatacaagtgcagggaaaagttgtgtaacaatactgtatcccattaatagaagcgctcctatcgtttctcctcctttaaatgtaaataaaactgccacgagcgttactacaggcacaaataattttgccatcttagcaacttgtctatctgaagcagatggaactatcgttcgataaatatttttcgctaacagtgtagaagccgccataacaagcatcgaacccggaaccaatgccgttaatactcccgcactaccaataattccaataaaccaaggatcaaaagtttgtaaagcaagacggaataacgaaagatctacatccgctccctttaacccaggaacttgcaatatagcagcaaatcctgcaaaaaatacgaaaagtaaaactaaagaatacaatggcataattgctgcatttttacgaaatactttttcattttttgcagaaaaagcagaagcaaatgtatgaggccacatataaaaaccgagggccgttaatataatagtagaaacaaaccaagaaatactcattccttcttcaggtaaagataaaaatcccggtttcgctgcctctacagcctcaaacatcggctgaaatcctccataataatgatacggtaaatatatacctaaaaacataacgataaacagtatcataatatccttcaaagcagccgtccaagccgaaccatgtatacctgaaaccattacatatatagttataacaatagcaccaatccaaaccgcaacaacaggtgacacccttccgtaagaagcttctgaaacgataattcccagtccttttaactgtaaaacaagatatgggatgatggaaacaacaccaacaattgaaacaataatcccaagcgctttacttctatatttcttcgcaaaaaaatccgactgtgaaacaaggttatgctctttcgcatacttccaaatcggtggcaataaaaaatacgataaaagataagctaaagcgccataacctaaaatataaaaggtaggtgctcctttgctatacgcccagccacttcctcccaaaaatgtaaacgtcgtataaatttcacctgccataaggagaaaaacaaaaatagtgccaaaccctcttcccccaactgaccattgctctaaattcatatcttttccatgttgtgcccgaatccctaaaaatagtgcgagaaacaaaaataaaataatgataagtaatgcagtcattttacatcctccttattagcaggatcaaacacgtacacaagccccatacaaaaagatgtaataaacactgataataatacccaaaataataaaaatggcatccctaatacgtaaggagtaactgaattcgcaaatattggcccaactactaaacaaagaactgggataagcgctagaatgtgtattttcttcatctcattctcctttacttataaagttcataatggctgatacaaagacttccactccaatcagtaatgcatcttcgtcaatcgtaaaacgagggtgatggtgaggatatataatacctttctctttatttcccgctccgataaaaaagaatgtccccggtgccttttgtaaaaacgctgaaaaatcttctccagccatcgtcggctgtaaacgaacaactctatcccttccataaagttgtaatgccgtttgttcaataagctctgtagcttcatagtcatttacaactggtcgatacccatattcatatgaaaatgtatatttcgctccgtaagattccgtaatatgcttcacaatccgctcaatcttcttctctgtttcacctcgtaattcatgtcttaaacttctcactgtcccttcaatctcggcttgctctggtattacattatgagttgtccccgcatgaaattgcgtaacagatattacgagagaatctaatggattcgtgaggcgagatacaatttgctgaagttgcgaaacgacttgtgttccgattgcaatactatccaccgtttcatgagggattccagcatgtccaccttttccctctatcttaattttaaaaacatccggtgcagccattgcaggaccataaataacacctattttcccaacctctaacgacgcccaaaggtgagcaccaataatataatccacaccttccattacacctgcagcaaccatctcctctgcaccaccaggaaaattctcttcagcatgttggaatagaaaacgaatctctcctttaatcttctctctttcttctactaacttatgtacaaccccaagtaatatcgctatatgtccatcatgaccacatgcatgcattacacctttatatatagaaataaaatcaaactcattttcttcatgaataggaagagcatccatatcggctcgaatcgcaactgttttgcccggatgtttacctactaactttgccatcacactatatttagtcggccgtgacacttctaaatatgggaatttccgaagtatatcgaacacaaactgcgatgttttctcttcttgaaaagataactctggatacttatgaaaatgccttctccactcaactaactgattttttgacaaaacaagttcctttgcaacatccatttctcttctccccttcttcaccaagttaaatgttattataacgtgaattgttaacttttaaaagaatcttctgaattttcagtgatggtaaactaaaaagaaaaagccatccaaaagatgactttttcattattataaaatagtaattgcttgttttcccatttgctcccaagctttctcaaattctgctcgcggaacagccaagcgcggattatttttaagaggatcatttacatatacaaagttttgatcatatccaattactactgcactatgctcataatatgtaattttcacttcgcctgaactcgtattccatgtttcaaaactactttcagctagcggcttaaacgtcgtattaataatgacccataccggagaaccagaactaattactttatatatatcttgcatgtctctacctgttaaattaattactttttcaggaacatatttttctgctaaatcaaagattggtttattgtatacaccatatccaggctctgcctttgtataaatatttcccacaaatccctcgtaaggatttccacgcaaaccattttgttcaaatggaacacgatgaatttcgctagcaagttgcatcttatctacttgtacacctttatattgcagcaacatagctaaacttgtcacttcacatcctcgaggtaattctggtaattgtttaataaacggaacatcttcaatcatagctgcttctttcatttcagatagaaactctaagcgtagaacttgcgccttttgcatgattttatcttttcctataaaaaatgcagcagcaagtataattccaaaaacaaaaagatattttaactttttcattataaacaaaactccattaattattattttacagatacacctcttatcattgtacccttcttcttactagtttgctagaaagatcatgtgaattatcgctcatagaattaattataaaaattctaattatttttaataaaaagaaaaataaatatacatttacagaatattttgctaaaatcaaaattgttaacatagtgaagatatcaccatgttaacaaacattcttagagtatttagtcatagttcgttttttacatactccattcatttcatagcaaataaaccgagtgtgttttgcatcccccactaatgattaaaaactcagaataaaacgaagtttacacattcaagaaaatacggggtgaggggcatatgaatcaacaaattgaacaaacagatttaaaacgaacaatgaaaagtagacacctatttatgattgcactcggcggtgttatcggaaccgggctatttatgggatctggtcaaatcgtccataatgccggacctggtggtgctattcttgcatttttagtcggtggatttgttatgtatttaacgatgttatgtcttggtgaattatccgttgctatgccagaagcaggttcattccaaagttatgcaagcaaattcatttcacctggttttggatttgttgtcggttggatgtattggttaaattgggctgttacagttggcgtagagttaacaactgtaagtattttaatgaaacgctggtttccagacgtttcttcctggatttggtgcgttacatttgcagcagcactcttcctcgtaaacgctttatcagcaaaagcatatgcagaagcagagttttggttcgcaagtgtaaaagtcgcgacaattgtcattttcatcgtgcttggtggcgctgttatgttcggtctactagactttaatggaaagccagctccaatgcttcataatttcactgaaaatggcgggctatttcccaacggtgcattagctgttcttcttacgatgattacagtaaattactccttccaaggaacagaattaattggaatcgcttcaggagaaagtgaaaatcctgaaaaaacaattccaaaagcaataaaaaatacaatttggcgaactctcttcttcttcgtcttagcgatatcagttgttgtaggtttactcccatggcaagaggctaatctagttgaaagtccctttgtacttgtatttgatgtagccggtgtcccatatgcagcagatattatgaactttgttattattacagctgtattatccgttgctaactctggtctatatgcaaattctcgtatgctgtgggcgatggcaaaacaaggaatggcaagcccagcatttacgaaattaactaaaaaaggtgtaccgctaaatgcattaattttcagcctaattttcgctagcctgtccttactaacaagtgtatttgcggcagatactgtctttctagttttaacatctattgcagcaatggctgccgttgtcgtttggatgtcaatcgccgcttcacagtttttcttccgtagaaatttcgtgaaaaatggtggcaacataaatgatttaaaatatcgtacaccgctctatccactcgttccaatcgtagcgttctcgctcaatttcattacatttgttagtttggctttcattccagatcaaagaattgctctttattgcggcattccatttatgattatttgttacattttataccaagttaaatataaaaaaattgtcacacttgaacagccacgaactgtcacacaagaaataaactaaatatacaaaatattcagctatcttccttatcataagatagcttttttctatttcttggatatcctggtataactttatttatcttaaaattttcacaatcacgtttttctctggaaaatagtttacaatgtaatcaagttacaaatgatattcaccttaaaaagtgtgcatttgtgtctattttttaacaatatatcaaaaactattgccttctataaattaataggtttatattgttttattggcatagtttcaatccaaggagaaaggagattttcaatcgtgcaactaaagaaagcgttttggaagttggcttcacttcttccgttatcattacttctgttcctcggtggctgtgataaaaaactcgcagtattaaatccgcaaggacctgttgcaaaagcacagtatgatttaattgtttggtcattcttgcttatgtcattaattatcgcaattgtattcattctgtttacagtcatcttgattcgttatcgtgaaaaaccagagaatatggactatgagccacctgaacaacacggtaacacattactagaaattatttggacgcttgttcctgttattatcgttatcgcattatcgattccaacagtaaaagcaacttatgcttcggaagaggttccgaaagagtccaaacatattaaaccagttgaaatttatgttacatctgcaaactggaaatggttattcagttacccagaggaaaaaattgaaaccgttaactatttaaacatcccagctggtgtaccaattcaattcaaactgacttctgtcggcccaatgaatgctttctgggtaccagaacttggtggtatgaagtacacaatggatggcatgattatggatctttatttacaagctgataagccaggttcttacctaggccgtagtgcgaacttctctggtgaaggattcacacacatggagttcgaagttgaagcaaaaactaaagagaaatatgacaagtgggttaaagaagtacaagaaactgctcctaaactaacagaagctaagtacaacgaaattgttaaaccaggtgtagttggtcgtatgacattctctagtcaccacttaagttatgtagatccaaaatcacttgaatattgtgattataactactacaaaaacaaaaaataatagctattattccaacagattggagtgaacacagtgaagcttgatgaattctttgtcacaggtgacccgattatttacggtgcagacgcttctatcgttcttgtgacattagcaatcattttcgtactaacaaagtataaaaaatggaaatggctttgggacgaatggttgacaactgttgaccataaaaaaatcggagccatgtatattatttctgcggttatcatgttattccgtggtggtatggatggtttaatgatccgtgcacagttaacattcccagaaacaacttatttaaacgctgaacactataacggaatctttacaacgcatggtacagtaatgattcttttcatggcaatgccattcgttatgggattaatgaaccttgtagtaccattacaaattggtgctcgtgatgttgcatatccgttcttaaatgctttaagtttctggttattctttgtcggagcaatgttattcaacatcgctttcgtaatcggtggttctccagacgctgggtggacttcttacttcccaatggcaggtacagagtttacttcaggcgtaggaaataactactacgcaattgcattacagatttcaggtctcggtacgctaatgaccggtattaacttccttgttactatcttaaaaatgcgtacacctggtatgactttaatgagaatgccaatgtttacttggtcaatcttaattacaacaattatcattattttcgctttcccagtattaacagttgctcttgcattaatgacatttgaccgtctattcgatgctcacttctttacgatggcgagcggcggtatgccgatgttatgggccaacctgttctgggtatggggtcaccctgaagtatatatcgttattttaccggcattcggtattttctctgaaatcattagtacattctcacgtaagcgtctattcggttacagtgcgatggtatactcaatggttgcaatttctttactaagtttcgtcgtatggcttcaccacttcttcacgatgggtgcaggtccagcggttaactcattcttctcgatttcgacaatggcgatttcgattccaaccggtgttaagatctttaactggttgtttacactgtataaaggacgtatccgttttacagttccaatgctttggtcattggcatttattccaaacttcgtagtcggtggggttacaggggttatgcttggaatggcagctgctgattatcaataccataacagctacttcctaatcgctcacttccactacgtattaatcgcaggtacagtattcgctatgcttgctggattcacattctggtatccaaaaatgactggtcatatgttaaatgaacgcctaggtaaatggacattctggatctttatgagcggattcaacatctgtttcttcccaatgtacttcttaggtttagacggtatgactcgtcgtatgtacacttactctgaaagtcttggatggggatggctaaaccaaatcgcatctgttggtgcggtaatgatgggtatcggcttcctacttctttgctacaacgtaatttggagtgcacgtcacggtgaacgtgacacaactggagatccatgggatggtcgtacacttgaatgggcaactcactctcctgtacaacattacaacttcgcgaagcttcctgaaattaaagaagctgatgctttctggtacatgaaaaaacgcggagaaacagttacaccagcagcagaagatattaaaccaattcacatgccaagtaactctggtgtgcctattattgcgtctggattcttcggtcttgcaggtttcgcattagtatttagctggttctggcttgcagcaatcggtggagttggtattttagcttgcttaatctatcgttcattcgattatgatgaaggttactatatcagtgttgatgaaattaaaaaaacagaacatatagcatgagaggtgaaatgacatggcggctttagataaaagcttacctttggaatatcaatccgaacaaagcagattgaatatcctaggattctggatttttcttggggctgaaattatgctgttcgcaacacttttcgcctcttatctagtccttgctggtcgtacggcagatggcccaacaccagcgcaattgtttgaacttaaaacgcttttaattcaaacattactacttttaacaagtagttttacatgcggtatcgtaattcatgaaatgcgtaagcataaccaaaaagcgatgcttggatggttcgtccttacattacttttaggtgcaggtttcctattctttgagattgaagagttcattatgtacattggtgaaggcgcaacaattcaaacaagtgctttcttatctggattcttcgttcttcttggaacgcacggagctcacgtaacaggcggtatcatttgggcaacttgtgttattatccaaattttaaaacgaggtttaacaccagttacagctcgtaaagtattcattatcagcttatactggcatttccttgatctagtttgggtctttatttacacactagtttacttgaacgggatggtggcgtaaatggctcaaaacaacaatcaagcaaacgggcatgcgcatagcggattcccttggtcacacgttttcggatttattttatcgcttgcattaacgtttctagcgttatacgtggcactttacacaacattgccactttcaacagtcttaacaactattatcataatggctgttgcgcaagcattgttacaattaattatgttcatgcatttaaaagaaggagaaggaagagttcaaattcttacaatgatatacagtttcttcgttgcaactgcaacagttggtttaactgtatggatcttcttctcaatgtaatgtacatgaaaaagactgctgagattcctcagcagtctttttttatcccctcccctgttacatccacattacggaattaacaacagaatcatgaaaaatatacttattatgacaaatgttaagaaaaatctttctttatgaaatcgaatccatatgcgttgcttttctacctattatatggctaaataggtactatatttatttgaagggagagaacgcaatggaacatcatacttctgttctatcacttatggttgtcgttgcaatcgcgtttttcgttccccttttgttacaacgctttaaattaaaagcacttcctgttgtcgttgcagaaattattgcaggaatctttgtaggtaaaagtgggtttaatattattgagccagatatatggcttcaagttttatcaacattaggatttatcttcctcatgttcttaagcggtttagaaattgatttttctatctttaaacaaaaagggaaaaaaaatacgacaaacgagccaaatacatttcaagtagcaagcattatcttcttatttattttcatcttatcttatgccctatcattactattcgtatggctaggatttgtagataatgcaatgttcatgactttaattatttcaactatttctttaggtgttgttgtaccaacattaaaagaaaacaacctaggaaaaactgcaatcggacaaatcattttattagttgctgttattgcagacttagttacaatgattttactcgctgttttcgtcggattaaattccgaaagcggtcaaagtatgtggctcttacttattctattcggtgccggtattgtcatttactttattgcaaaacgctttaaaaacattccatacttagatagtttaaaagctggtagtgtacaaattgatacacgagctgtttttgcactcattttaatcttagttgggttatcggaatctgttggagcagaaaatattttaggtgccttcttagcaggtgtacttgtatcgttattatcaccaaatgaagatatggtggaaaaacttgattctatcggctatggtttcttcatccctattttcttcgtaatggttggtgtaaatctagaggtgtggtctattttcaaagaaccttctagcatgctaatgattccaatcttaattgtaggactctttatttcgaaactcttaccatcactcgtcttaagaaaatggtatccacgtaatatcgtacttggaagtgcaatcttattaacatcgacactttctttagttattgcggctgcacaaattggtgaaaaactggagatcatcagtccaagtttatctgcctctcttattttaagcgcagttattacttgtatttttgcacctatattgtttaaaaaaatgttcccaaaagtagaaacaccaaaaccaaaagtagctattattggcgcgagcagaattacccttccgttatcactagatttaaaacgagaagattatgacgtaacgctatatatgatgcgtcaaaacaaaataaatgatgaagaagcgaaatcacatgacttccctatcgtgaaattagatgacatcacaatcgcatcattaactgaacaaacagcatttgatgcagatcgcgtcgttgttgcaacaagcgatgatgaacaaaacttattattggcagaacatgcaaaagagctaggtgttgaacatgttattgcaagtgtagaagatccacttctacaagaaaaagcaacgcaagaacatatcgctgtattctcaacaattaactctacacgtattttattacgtgcacttattgataaacctagtctcgttcgcttaattacaacagcaaacgaaacagtacgtgaagttgaactgcgcagcaataaatataacggcgttgcgcttcgccgcctcccgtttttaggtgatgtacttgtcattcaaatctaccgcggtaacaaagcattaataccgcatggtgatacaagactacaacacggtgacacattacttgtaacaggttcaaaagaacatatcgatacactaaaaaacatattagagtaaaaaaatgcccctcacataattgaggggcatttttttaacttcatatggtaaaatgttactatcacatattatgaggatggatcacattatgtctattgtaactttagctcttttattattagcagaaatactcgttgccattattctcatcggtgttagtattgagatttgtagttacggatggaaaaaatcgaatggaataaaatattcttgcctcctactttcactccttctcggaactgctagcatactcggacttctcgccgcacctgcttatttctttatacaattaacagaaaaggccttataagaaaggatgttaatatgattatcgtgaaaaatattgagggatctgaaacttacgtattacgtcaaaaaattttacgccccaatcaaacattagcagattgtaaatatccttccgattatgaaacagacaccttccacttaggcgcatttataaacgatgaactaattagtatcgcttccttctcaaaagaaatataccctgacctaccagccggtattcattatcgtctacgaggaatggccacattacctgagtttcgaaacaaccacgctggaagctccttaattcagaatgcagaacaaatcttacaagagcgtcaagcaaatatgttatggtgtaatggccgaattactgtaactgactattacaagcgattaggctttcaggagcatggtgaaatttttgaacttgaaccaattggccttcataaagttttgtataaaaagatataagaaaagctttcctcaatacgggaaagcctttcttatatttcaatcttctctttttatttttttcatatatatgtatataaacaaactaggaactaaaaaacaagcaaacataataagtcctgtcatactaatttcctttatcgaaatatctggtgttacaacgatacaaatagctaaaatcccaataataatacccaccggaatgaataatagcttcataaaataacgacgcgacactccgcccgtatgctcatacacttccactgaatttttcagatttaaaaagttaataattattatcccgcccataaataccattaataaatccgaaacactttcatatcctgccccttgcaagacatagcggtaaaagacgatagctagtatgacgatattttgtaagatgaaagctaatctaatatgttttaacccttcaatcattaaacgttcatctttcacgattttcatcctaccactccttttcctcccaaaacaaatcattcaacgttttatctactgcataacaaatttttaaacataaatctaaagatggattgtatttccccttctcaattaaactaatcgtttgccttgtaacgcctactttttctgctaattgttgctgtgttaaatctaactgaacacgcgcgacttttattttacttacagccattcatgttcctcctctatctatattgtaacatatatattccgttaagtaatttatattttacaaaaccaattaagttttcatcttatcccgattggtgcgggctaatacacagtgaggatatcccctactgctcatagtttcactttattatacacaaaaagggagcctcccataagaaggccctctcctatatttatattataagaataaatgacatccaaataagaatgcaaataagtatagtaatggatgtacttccatccctttacccttcacaattttcaagactggatatactaaaaatccaattgcgattccatttgcaatactagatgttaacggaatacctataaaaattaaaaatgctggtaacgcatcttcaaattcattccaattaatatctcgaatgctttgtgccattaaactacctactataattaatgaaggagctgtaatagcggctacacttgataaagaagcaataacaggactaaaaaatgccgttataattgttagaccaacaactacaatccctgttaatccagttttaccacctgcagcaatacctgctgacgattcaatcgtcgctgctgttgggcttgttccaaagatagaacctgtagtcccgccaattgcatccgcaataaacgctttaccaaaacgcttctctgtattgtctgtaattaaacctgcttgtttaattaaaccgagtaatgcacctgttgtatcgaataaaagtacaagtaaaaatgaaaatacaacgccgtataatccgtattcaattacatctgaaaaggcattgattgggtttgaaacgatgataccctctggtaaatgaggcatcgccacaattttatcagcaaacttcaattgccctgtaaagaaggcaataattcctgtcacaatcatactaataaataatgcaccgctcacacgcaatgtcattaataccgccgctaatattaaaccaattaaagttaaaataacagctggagaatgaaaatcaccaatcgtaactaaattagacggatgatccacgataattccagaaaggcgcaatccaataaaagcaataaatagtccaattccacctgcaattgcatgctttaaactatcaggaattgctaaaattaacttttgcctaaacgaagtaaaagataataaaagaaaaataatccccgttacaaatacagctgaaaaggcaactacatatgtaatcccttctgccttctgtacaacagaataagcaaaatatgcattcattcccatagctggagcaataacaattgggtaattcgcgaaaatcgccatacctactgttccaacaacggttgcaataattgttgctgtaaacgcttggtcaaatggtacacctgcatcagataatatttttggattgatgacaagaatatacgcaaatgtaaaaaaagttgtgatgccagctaaaaactcttgcttcacagaagtgttatatttttgtaattgaaacatgcttatgtacccttcctacacctgaattattatcacacattctttttcttactagtatgcgagaaaatataatacttaatcttaacaatcaataaaaagaagagtcaatatattccctaatagttcgaattttaagtttaagtctgacaagtacagatgtagtacagttcattatgattatttttgtagcataacagatagaaatgttttataatttgaaatagttaaatatttagtaaacgcattcaaatatcgttcactctacaagggggattcttcttatgcagcacacaaacaaatctggaactttaaatcgtggtttaaaagaacgacatattactttaatgtcactgggctcagctattggcgttgggctatttttaggatccgcttccgccattaaactagcaggtccttctattttgctaggctatatgattgccggtctcgttatttttttcattatgcgagcgcttggggaaatggcaattgaacaacctgttgctggttcttttagtaaatatgcatatgattatattggaccactcgctggttatattactggttggaattactggttcttatgggttgttacttgtatggctgaaattacagcagctggtatttacatgcagtactggttccctgatatcccgcgctggacttgggcattacttgctctattattaatgagcgcttttaacttcttatcggtaaaagtatttggagaacttgagttttggtttgctctcattaaaattgtcacaattatctgtatgatagtagtcggagctggtattattttattcggattcggaaacggtggtatcgctactggtatttcaaatctttggtcacatggtggctggttcccaaatggattttctgggttactactctccatgcagatggtactattcgcttatttaggcgttgaattaatcggcgttacagctggtgaggctcaaaatccgaagaaaacactcgcaaaggcaattgataacgtattttggagaattctactcttttacgttggggcattattcgttatgatggcaatttatccatggaacgaacttggtgagaaaggcagtccattcgtattaacattccagcaaattggtatcgcaaaagcagcaggtattattaactttgtcgtattaacagcagctctttcttcttgtaacggtggtttatttagtacaggccgtatgctatatacattagctcagcagaaaaaagctcctgaaagatttggtcgtttaaataaaaatggcattccaagccaaggaattgtagcaactgctatcgttttactaattggtgttatattaaactatcttgtacctgcaaaggtatttacatggcttactagcatttcaactttcggtgcaatttggacttggggcattatattagtcgctcaaattaaattccgtaaaagcttgcctactcaaaataaacaaaagttatcatataaaatgcctttatacccattaagctcatatttctcacttgccttccttgcactagtcttatgtataatggcgtattcagaagatacacgaattgcattgattgtcggcccaatttggcttatcggcttagcaatcgtatattacatgaaagggtttcataagattgatgaaacacctaactcaaaaattagttaagcaaaacatcccttccttattacttggaagggatgtttttatatctatataaatatttctcaacaaaattcacggtatttttacaattttttaatattttttatgttttccgtctttatttttacagaaaaataaattacattattaaagcacatatatttattattagggggattcttctatgaagaataaaaaatggattacattttctttagcaacagcaattacactaagtatagggacctcgttcataccgtctacttatgccgaaagctctgtagacccagctcctgaaattgctgcaaaagttgtaaatcaaaacaatgggaagaaagtattatttgataatacacacggtcaaactgctgggacagctgactgggttattgacggcggcttttctgacttcggaaacggcattgcaaaaaacggatatcacgtaaaggaacttcgtaaatcaacacctattacgtacgaagatttaaaagattacaatgtatttatcgtcccagaagctaatattccttacaaaaaatctgagcaggacgctatgttacaatatgtaaaaaatggtggtagtatcttctttattgctgatcattacaatgcagatcgtaataaaaatcgctgggactcttctgaagtatttaatggatatagacgcggtgcttgggataatccagcaaaaggaatgtctaatgaagaagcaaattcacaagctatgcaaggagtagaaagctctgattggctctctgacaacttcggtattcgcttccgctacaatgcacttggtgatgtttcagcgaaaacaattgtatcacctgaacaatctttcggaattacaaaaggtgtttcgtctgtagcaatgcatgctggttctactctagcaattacaaacccaaaactagcaaaaggacttgtttaccttccagaaaatccatcaaaatggaataacgctgttgatagtggcgtttataatggcggtggtattgcagaaggcccatatgctgcaattgcaaaagtaggacttggaaaagctgcctttattggtgactcttctcctgttgaagatgctacgccaaagtacgttcgtgaagattctggccaaacaaagaaaacttacgatggttataaagaagaaaacgatgctatcttattagaaaacatcgtaaattggttatcgaataaagagacatttacaagtttagatcaagtaaatggtttacaacttgattcacctacagctctacagacatttgaacagccaagcttatcaacagaaccacaacctgaaccttggggtgcaccaaatgcaggttatcaatggtttaatacaaatactttcaaaccaggttcatacggttataatggtgcggtaacaacaagcgactacgtcgttacacaccctagcattctaccaaacaatgaaattttccaaatgaagattcaagtaaacaacttactacctaatacaacttataacaactattctttaggtatcttcactactggaggaacacaagtggctaaagtacaaaatgcaaacggcacttggccatctacttttggatatagcagtgcattttctttcacaacaaacagcttaggctctgctgagaaagttgtaaatgtacagattgattcaaatacaattggacaagcaacgcttcgtctacgccaaaatacaacaacgaaatataatgaaactgtaacaattaataagaaataataaaaaaggcaatccatacatggattgccttcttctcacttctcttccttcgagaaaaacattcttgaaataacgatacctatactaccgacgattaggaataacactgccctaatcatcatcgatacctctggtaagtcaagtaagaataacttccctaccgttacgactaaaacgactaaaccagcatataatatttcattcatatttctatttcttccaaaccaaaccgcaaataatgcatataccatccataataacgatactgatacactaattacgcttccatctgtagataaaacttcaccgattctcgtaattgtaataaatacaattatcataaaccaatagagcactatagaatacatatatttgccgaagctcgctaatacttctttcgcttctctcatgcaataatagaacgttcctattaaaataagatgagcaacaaagcctgccgaaataaattgatcaaacgggctaaaaatagtctgtatcattccaattgcgtaaaccgtcgcactaacatacaattttatctgttgttttactttaatagaagtgaccatgccgaggaaaccttgtaataatagtacaatcgctgcattcactaaactatactcatataaaattgctaaactaaatgctcccattgcgaaaccaaataagagatttgtaaatgtagaatgtctatttttcctatattcaaatacgaacatagcggcatgcacgattgcactaataattaatccccatgttgtaaaatcaggtatttttgaaatagctagtataaagaacactgcatttgcactaaatatcgccaaacgtggttctagtataaaacttctctccgtaaacatatgccaaaataatagtaaatgaatcaaaccatatacaatcgttaactgtatttgcaagttctctactaacattgacataacagcaaagaaaacgaaaaggacaatggcagcaacagcgtaagaaatcatatataagtatttataacgatttttcaacgcataccataataaactaagtgtcaatactgtctcatatccaaagaaaatataaggattaggagtcgtactatttaacaagaatggtacgaagaacgctccgaccgctacgaaaatagtgagatattccgattgatatcttttcgctaaataaatacctaaaataacccatgcaatattacagagaaacgcgacacttgccggaataaatccatataaataatgtgctgcaaacgttgttagaacaatcccggtaatacttcctccagctaatactaaccctaacgcctgccgctctcttttaatttgaatatctcctatataatacaatccgatagataatacgataccaaacacaattcgtatcgctggtgttaataagccagcatctacccctgctttaaataaccagatcactccaagcaacataataccgacaaatacacgcggtaaccatgtttgacaaaacttaataatattaaatggctctggtttaaaagcagatatatctacttgttttacctgacgttcttgcaaaggctcttttatcttaactatttcttcttttggcttttcctccattaccgtttcaatatattctttcttgttcttactaacatgttgctgagcgttttctacttctatttccctttgctttacttttaattcagcaagtgcttcttgaattgtttcaattgccgtttcgagtgcttctattttcttatccaaatccttcttcatacgctccccctcattcgtaactctcattaaacctatatattaccaattatctttatcatactcttagtctattcattttcaatagtatttttccaaaaaaagaaaggcgtcttcccaaaataggaaaacacctttttactcatttattcttatttagaacaatgctaacgatgaaaccaagacacatgcctacaatagctggaacaatccacccaacaccttctgtataaaacggaatgtattttaatgctgacgtccactgattcatcattacatttttatttaaaatatcaattgcactaaatatcgctacaaccaaaacagttactgcatatacgtatgcatactttccaatatactgatggaataaccctagaataataagcgttaacgcaattggataaataaatccaagaattggtactgatacttttaaaatttgcgttaaccctaaattagctaaaatcatactaacaacgcttactataaatgcccacaatttataagatactttcggaaatgcactcgcaaaaaattgactacaagacgtaacaagtccaattgaaacacataaacacgcgatagtaaaaataagacctaataaaacgactccgccctgtccaaataatgtaatcataacttgtgctaacactttcgcaccgttatcaaatgttcctaatgagccactaattgcccccacatatccaaggatgacataaataatcgataataataatcctgccccaatgccagcaatactcatatatttcgctaaacctttatcatcttcaataccctttgcacgtaatgcatttgcaataacaattccaaagattaaagcagctaacgcatccattgttaaatatccatctaaaaacccttgaaacataggagcttgtccatagttccctattggttctttcatatctcctaccgttgtaaacatactctttataaaaatgagtgcaatcatacataataataacggcgtcaagacttttccaaacaaccccattaatttagatggggataaacttaaccagtaaacaatactaaagaaaataactgtgtaaaacaataataatccgtttcctgcttcagggaataactgacctggccccatttcaaaagctaaacttcccgcacgtggtataccaagcccaggtccaataaatacatacacgatacatggaaaaataattgcaaatgaagaatgaaccctacccgctaacgtttgaaaacttcctgcttttgcaatagagataacacctaatataggaagacctgttgctgatataataaaccctactaatgaaatccaaacatgttctcctgcttcatatccaaggaaaggtggaaatataagattccctgctccaaagaacatagagaataacataaggctaataagtaaaatttcttttttctctaacaatttcatttctttctccttctttaatttcatcttttatgaaatcaatttcacatataaaaagtacaataacccgcttccttacaaagaaaacatagtccatagtctatcacaaaagaaacacccattctatagctattcctcttttccaatttcttctgaaaaatcaacctttattgacttataatagttaataaggtaaaatattaaatgtacgaaattattaactttgtttttgtttgtgtcaggaggaaaataacatggaatcagcgatacaactagaaagagaacaacaaagaaaaaagaaacatcctccaggtttatacttactcttctttacagaaatgtgggaaagatttagttactatggattacgaggattattaacattatatttaacgacagctttagtaagcggtggtcttgggtttagtcccgcatgggcactctctatttacggattttatactggagcctgttatttcacaccaatgattggtggatacttaacagaccgttttctaggtagacgaaaagcaatcacaattggtggtataacaatggcaatcggtaaccttacactatttgccttgcaaaaccaattaggcctatacctcggattagcgcttattattataggtaacggattcttcaaaccgaacatctctacactggttggagaattatacgaagagaacgatccaaaacgtgatagtgcatttaccattttctatatgggtattaacgtcgggtcatttttagctccactcgtttgcggatttttatcagaaaatttattcaaaacaacagttgatggcgttgtacattacggattccgttacggtttcttagccgcttcaatcggaatgatcattggacaaattttatttacaacactatcaaatcgcttccttggtaatatcggtaaaaaaccaactcgcgatttacaaacagctgctggacaaccatcagtaggagatacaccgttaacaaaaaaagaaaaacaacgtaccgcagttatcgtcattttaacatgcttcgttgtcttcttctgggctggctttgaacaagctggtagctcattaacattatatacaaacaaatttgtagaccgctctgtgttcggatgggaagttccaacatcttggttccaatcggtcaatccattatttattattttacttgctccagtcatttctgcattatgggcaaaacttgcaactcgcaagcaaggtgatttaaaaatcccaactaaaatgggacttggtatgatcttactcggtatcggttatatcattctcgttatcgctacattaaaaacaggtagtgatgaacataacattacagaaaaagcaaacttactgtttatcgtctttacgtatcttttccatacgttaggtgagctattcttatcacctgtcggactatcaatggttagtgcgcttgctccggtaaaattagcatctttattaatgggtgtatggctagcaagttcaggtatcgccaacattttaggcggacaactcgcaagcttcacaacttcacttggatacgctgaagtattcacagttattggcgctgtggcaattgtattaggctgtgttttattattaatttctaagaaattagtgaaatggatggattaaaaaagatgaggaatttctcctcatcttttttatgctgttttacctttttctattgcttgttcgtacagctctttatgttctttatattcacttggtacgaaactcttatagaagaatgagaaccagctgtctccttttttatacccttcttctcgaatttccgctgcttttttattcgatttaaatccttcagtaaaccacttctttaacaattcatttcgttcatacttagcaggaacttttaaatcatagttttcaaatgcatacttatagccagccttttctactgccttttttgtagacttatagcctttttcatacgctgtttcatatgccttcacgtatacttctttctctctattttcaggattcttttcagctagttctttccctgtcttttcccctaattcagcttgctctttttcaattttttctgttctttctttattccctactttgaacccgtctgcaaagtttaccttaaactctggagcaacttgactatcgtccatcgtctcttgtgctaaaccttgttcttttcctttttcaaaatgcgttttcttctgctcttctaaagaccatgcggctgcataagtcgctttaaacgcttgtttatatgcatcagattttccagctacatgcacttctgcatcattttttcctgctttaaaatcagtttctccattcttttgaccttcaagttgacctttttccatatcagcttggcgctgcgcttcctcttgcttacgtgcctcttcagcttttctttgttcctcggctacacgttgtctctcttcttcagctttacgctgtgcttctgcagcacgttgtttttcagcctcagtattgcgctgtgcttctgcttgtctctcagcttctacagcactattattattctgactaggagctgggctcgttgcgccactactagaagctggtttattgtgataatgatattccccgtactgtaatccccacttctcacaatttgtacgacacgtatgtccgccattagcatctgtacgccctggatgcgcataagctgaaattggagctaccaataacgctatactcgttgttaaaagaagtttcttcacctgttgtctcactcttgttcctcccaaaatatagaattctaactttattatacataaatagaagaatacttaaatacgaaccgaaatattctattatttctcaacattagtaaaaaagaaggtgaactctttaaagagttcaccttcttttttacttcttcgccttcgttcctactaaatcaccagcaacaacataacgcttagaattatcctttacagatacacatgtaataagcgttatctcatctttcccatgatcctctacaacttcccacttatcaggagtcacttcagatacaccagtaaccgcatactcatattcattttcattgtcatacaaataaattttatcgccttttttcaaagaagctatatcactaaataaaacaccttttttagacatattatgtcctgctaatgcgtaatttccttttcccataacttgattctcttttactgtcgctgcacctgataataagtttttttcagtagaagcttttaaaacaggcagttctactgaaacacttggaatcgaaatacgaccaattacttgtttcttatctaatgatgcattcgctacttccgccaagtctggttgattaattttggaagcatctacaaattccgtctcatgcttttcataatccatcttttgaacagcctgcacattttcagtctgtttcttttcagcctgatatccatcataaaatggctttccaattaacacgccacctacaacaaatagcagaattgctactatactataaattctttgcttattcatacacagttcctttcccttacaaaatcttactctatataaaatgataaaataatatcgtcatatgtacaagtattagcttaaaaagaaaccttcttgccggtgcaagaaggtttctttttaagctaatttatttctgtatagtgatacgtgaaatactgtcatttgaataaagaaaatagaaaatagaatatataatgggtatccaggaagatattcattaataataggcgaaaaagttaaaaatccaactgcacaaggtaacacaaaccataacgatacaaatgttgttcggcaagctttatccgtaatcgctttttcacgttcatcttctagcggaaataataatggatacatccaaaaagataaattcttatattttttcttttgaattctataaaaaattgtaactataattgctccaataaataataaaatgaatggtactccattaaaccatacttcaaatgggaatttctcgtttttaattatatgtgctaactctgtaataacactataaaattcaacaaatgtccaacatgctagtgcagtatagagtacatttataatataagaaaaaacaattctattcatcctcttctccctccttatttaaaacaaacacatcttccatctttaactggaacacatcacaaatcgtaagtgctaataacaacgaaggaacgtaatcccctttttcaattgctgcaattgtttgtctcgttactccaaccttttctgctaatacgctttgcgtaaagttaaaacgagctcttaattcttttactctgtttaaaatggtcaaatttaccacctctcaccattattgtatgctattcttaacaaaatgtaaactcaacttaacattattattataaaaaaatccaactctacgtattgtaaagttggattacttgttagtttaaaattgtaactttaactgttcttctgccccagctacttgatgaacctttatctggcattaaaacatcaattctatgccctttaatagccccaccagtatcggctgcaattgctactccataaccttcaacatttacagtcttacctaatggaataacatttggatctacagcaattaatttcattcctgggtttgcagttagattataacctttaccacctggtccccatgcagaaaatacttgttgacctggtgcataaccattttcccctggatcagctgtataagctgtagcttctacataaatttctttcccaccagcagttggcttagaagatggttcaggttgtgcaggttctaccttcgaattattattagcaactggttcagctggtttactagctttttcctgcttttgcttttcagcaatttctgcttgtgctttcgctaaagcttcttgctctgcttttgcagctgcttctgcttttgcacgctcttccgctgcgattcttgctgcttcttgctcacgagcaatcgtttcttgtactgtcttcatatttgattcaattttagctttttcttccgctgctaaattaagttgacttgcaacttcattatatttagcttgaactgtttgtaagttatcttgacgctttttcaagttatcttgcagttcagcttgcgcttttgctaatttttgtttgtctactactaaagatgcttctttttcgtcaattgttttcttatcttcttcaatttgacgaagatcttgttcttgtagacgtaaaatttctttatcagcttctagaatagtagaaactgcgttcatacgttgtaagaagtctgcaaagttttttgattctactacaacttctactactaaacttgtatttgaactgttttgaacagaaaccatacgttttctcataatatctttacgagcaaggactttatcctccaaaacgacaatttcttgctttttttgctcaatctgcttatgtgtttcatcgattttacgttgaatagcagcttgatcctctttattttttgcaattgtattatttaaattatgtagttcgttttcgatacctttaatttctttactaacagcttgcttctcttgctctttcttttgcatttctgcatcgttttgttgcaattgctgttgcatgttgttaagtttctcgtcgtttgactctgctttaacagcgactgtactagaaagaccgataattcctgctaatactagacagctgattcgcttaaaatagttcataatccgactcccttcttatacagttatacatgatttattttacagtttgtttacaaaacgattaaatacagtttatttttcgtgacgaaaaaaagagaattatgaataaaatgtaatagattcttaaatatttaacaattcctatatttaaaaaatacaaaagatgctaaaatccaaatatagagaaaatataactttcgaaggcggttgaaataaatacatgtttactcaaaaaaaatcactccaacatacaattgctcaattacaagagcgtatacaagaattagaagcagaattaaaacaaaaagatatcgaaaagcaggagactatttctactatccacgatcgtgtacaaagcgttatccaagagcatcaacttgtaaataaccaacataatacacttcaaaatttagttcaacaattaagttcatgtttcgaaaatgtttcaacacgtacaacacattccaatgagttaaataatgaaatgttacaaaaggaacaaagcttaattcagtctattgcagaaattattgactgctctaatgaaggaaaagaatccgttcaccgcttacttattgtaattaataaattaggtgaacaatctcaacgcacgtctaatagtatgaatcatctaagcgaacgctcaaaggaaatcgagcaaattgtagaagtcattcaaaacattgcagcacaaacaaatttacttgcattaaatgcgagtattgaagccgcgcgtgctggagagcacggtaaaggattcgctgtcgttgccaatgaagtaagaaaactagcggaaagtacagcagaaagtacaaaaaacatcggcaacttaacgaaaaaaattcaagaagaaattgaaaaagcatatgataacacaaaagataatttacatttagtcgatgaaggtgtagaaatgagcgccgatacaaatgctagaattgaaaatattttagttatgattcaaacgttacaaaatggtgctacaaatgttattaaggctatcgaaaaccaaaagtcttgtaatgatgacatattacgagaatttgctaacacacaacaaatgttccaaaaattaaatactactattatgaatcatattcatgatgctgaaaaagtcgatgttcaattgtctaaaagtcttcaaggaacagtgacttcttaattaaaattaagaatcccttatactgctataagggatttttattttatttagaatatttatttcttttcaatattcatccatatctttgttatactggaaaagttgtttctttcaactaataaacaaggaggttattatggaacaattttactacgttttaaaatatttaattctcggtctgttccaaggattaacagaaccaattccgatttcttcaagtggtcatctcgttttagcacaacatttgctaggactaaaaatagaagggtttagcttcgaactacttgttaattcagcttcattattagctgtattacttatttatagaaatgatttaattcgtctaacgaagaatggtctctcttatatatttacaagagcagaagacgcaaaatcagatttcttctttattatttatcttgttattgcaaccattccagcaggtgttattggtgttttatttaaagattacatcgatcagtacttaaaaggtgtgaagatggttgggatttcccttcttattactgctgtcggcctttggattattagaaatttacgcggtcgtaaaaatgatggcgacctttctatgaaagatgcaatcatcgtcggattagcacaagcttgcgcactgattcccggaataagccgatctggtgccacaatcgtagcagcaatgttacttggtatgaagcaagaaacagctcttcgcttctcattcttactatacattcctgttagcttaggtggcttattgttaagcattacagacattgcaaatgatccaaatctagacacattattcgtaccatatgtcgttgcattcatcgcaacatttatcatgacgtatatttcactaaaatggtttatgaacattatggcaaaaggaaatttaaaatatttctctttctattgtattatcgtaggtgtacttactcttattttcttataaagtaaaacttacaaattaaaagcgagtcatctagtgtaatagaatgactcgcttttttatacctttattaagttaaaacctattatttacttataattttcagaatagtataatatttatcaagttcactattacagtaattctatctttcctactattatcgtaaaagaggtgtttatatgtttatagttactaaactcattcacattaagtacgaatatgaaaatgagctactttatgggcttaaacaatattatccttcccccggaacgaacggttgtattaacatagagttttcacctgttcatcgtacaaatgataaggcagagtatatgattcgtatgttatggaaaacacaacaagattaccatacatggctttctcaaaaagaaggcaatgaaactttgaagcacaaaatacaaggctatatcctttcttccaaatcaaatgctacctatgtgcattaatccttctctttttattccttacgagggccaaaatgataaagttaaattaatcagccctcatcaattgggctgttcacaaataacgagataaggaccctcttacttttcatactgtaagagggcttctcttatgcatacactttcttctcttgacaatacaaacgaataacatgtttattttgttgaaatacatcatgcgtcagccgaataataataaagtttcgttttgtttgatcatcatgaacaaaaatctgttctccctcctgaaaacgccatgcactttcaaaagtcgtaatatgatccccacttacagaaaaaagttcatatcgcatctcttgtaccctctctcaacttatataatcacaatatccttatattaaatttattataacttaatccctatcaaattagtaattttttctatttcgaaaggttttaactttgtatttaaatatttttagcgctataatgataaacgaatttttattgaaaggagttttactttgactgcatatttatttccagtgaaaacagcatttattttatttccttttttagcaatgtttcttttaatcccttttttaatatttaattatcgaaaatacggttatttaaataaatggcgctcatttattttatactcattattactttacttattaaatgcctattttcttgttattttgccgttgccacaaacgtttgatacttgtagcctacaaccggctaatacacaacacatgcaactcgcaccattttatttcatacaagagattagtagtcatacatcggcagttttaacgaaaccagctacttatttctacttattaaaagagtctgcgtttttacaagttgcctttaacgttctattaactgttccattcggtatttacttacgttattatttccgacgtagtttcttacaaacaatttgcatttcctttttcctttcactatttttcgagctaacacaagtgactggattatacggtatatacaattgtgcataccgattatttgatatcgatgatttgtttttaaatacattaggtggcgtaattggttttatcattgcaccaatatttacgtacttccttccgaagacaaacgagttagatagtcatattgatttggaaacgaaaccagtcggattcattcgtcgccttatcgcgatgcaaattgattggattttcttatctatcgtcgtacctgtcgttaaaaacaaaggaaattctttcttcgtttctaatatgcaatcttacaccaatatgtatgaactcattttcattacgtgttcaatccttatttactttattattattccatactttactaacggaaaaacaattgggaaagcattgcttcgcattcacgtgaaaggaaaatcaaatcgtattacattaaaagaactatttattcgttacggtatattttattttgcattaggtggaatcaattatattctttctagtagctctattttaaatcacacagagcctttagtattactcgttacattattattcctattcatcattaacggcctatttattattcatgttttactgcatgtatttagccgtgataaactactattttatgaacatattagtcatacaagaaatgcaattacactaaaaaaaggtgacaaataattatttgtcacctttttcatatacataatgtgaaactttaattagccctcaccaaccgggcggttatctcccaccgaattttgcgacgagagtgttactgcccgacaaatagcgggataaataacttttctgcataaggattaaaaaacattccaagttcatctagagatttcctcacctgtaaaaacgaatgaaattctggatatatatattgtaattgctcatatgataatgtatgcattttcccccaatgtggacgcccttcatactttagaaaaatcttttccacttcgccaaagtaagcagcatatttcatacctttatacatatgaacagcgatatatgctgaatctcttccataggccggactaagccatatatcatcccctttcacataacggcattcgattgggaagtgcaccttatactttttcttttcaataagatttgagatttcttctacaaccgtcctcatatactttgaaggaatgctatactccatttcataaaatggcaccgtacgtgatgtagcaaatacttcatagctcgggccaattatttttgtgtttggtacagctttagctgataaccgactcacgcctttacttatagaaggaaaccatttacatcctttagatagtaaagagaacatcctattttcaagtaactccacctttagtttatgccatttcaaatcactgcctttattcgttgtttcgttcgtaagtttcacttgtacttcatcagaataaggaaaaacgaaaaattcaaaatgacgatgcttcttatattcttctagtttgttcattacagtggataatgactgtttttcactttcataaacgagtgaatacgctggaataaccttcaattttatctttacaatgatacctaacattccaagtgacaactgaaacgctctccaatattctacgttctcagcttccgaacaaactatactctcaccattagatagaactgccgtaatctctataacttgtgttgataaactcccaaaggtaatacctgttccatgagtccccgtactaatcgctcctgcaatagattgcgaatcaatatcccctaaattttcttgcgcataacctttttcctcaagtaacttccctaaatcatataactttgttcctgcccatacttcagcaaccatcttctctgcatcaatattcacaatacccttcaattcatctaaagaaactaaaacttcttccgtttgcacaaggggggtaaacgagtgtcctgaaccgacaacacgaattttctttcccttttttcgcgcaagccccacaacttctactacatcttgtatactttctggatacatcgtataatgcggcgttccttctacattccctgtccaatttctccacttttgtccctttatagaaagcattggccatccccccgatatgttgaatactccccgacaatctctccttttttaacacgatacaaaaaaggaaagcgttcacataattcaccagccttactatgacgaaacaaaatggtctctcctatatccactcgttcctcgccgttataaaaaattggcgtttgtacctcgccagcaccttctaaagctaataattttgcacccttcggtctccaaacttcaggctctttatcttttccaactgctcctgaagcaatatatccaccacctaggcaagtgtaaataaacgggactggtttacgtacaactggtaaggcaaatccgaccgctggatgaaatttcacctctttataataatcaaacagcttcggagaataaaaagcagaacctattgtaatctctgaaactgaattatctttctcggttatttttatgcttcctgttccgcctccatttacaaaccttagctcaataccaatgttttgtattgcttttacaatatgttctcttctttctttaacttctagcactgatttctgctttaaatacgaaatcactttacttttcaaccattgattcggtatataatcgcccaccccggcaatttgagcttcatatcccattacaccatctaacattaaatatgatgaccttctcaccttttctactactttcaacgcatcctgcacattttttactggggacctttgtacaccaaaatgaaattgaaagaagcgactactcatatcaatatccaaacaaacacgaaaacatcctttagattgctcagcaatgttttctaaatacacaatatgctcttcacaatccaccatacaagttataatgaaacctttctttgttaacaaactaatttcatacagagctctttcatcgtaagcaggatatccaagcaataaatcattaaatccttgttctattaaaaataaaatctctctaggtgaaaagcacataataccttgaaatcgatcatttgcagctagtatcttttgcataatcggaacagagcgtaacgatttactcgctatacgaatctttttatttccacttaactctataatcgattgaatatttctatctaaagccacttcatccaaaaatgcacacggtaatggaacttctttaaaaattcctcgatccacatttttctctcctcttctcaatatgtcttatacatattggaaagaaagtgtgattttcctgtttgcaaataaaaaaagtttcttctttacgaagaaactttttgaaactacttcatagaaatagtcgcctctactggataatgatcagagtaatcattgatatataaaactttaatttccaaaaagcgcacaaaacatctatattaagcagttttacgctacatcaaaaaatataaatggcaacacttttctggttgtttgtgaccatattcgttaccgaaaaaatagaaattaaactaataaaaaaataaaagagcacagcgtgttaataaagtggtggaacactttattaaccgtccgcctaacgtaactaggcaaacacttgctgtaactctttatgtaccttattttatcgtacataagggttcctccgcaacagtttgcttacattttgtggcatactgttgcttttttacttttaaaggagacgagcccttatgaaaaagaaacaagcaattactattcttgctagtacagaaacatacgaaaacttagtatcttttcaaactctcaaggaattaaatgacactgtacgtgcatataaaaagcaatttgctgaccaattaaataaaaatcaattagctgtattaaataaattacacaattattcttctaaatttcttggtgtatctttcagaacgaaaaaacacattgccgaagatcttgatattagccgtagaactgttatccgtgcatgccactacttagaatcacttggcattattaagcaactggaaatgaaacgtaagagtgacatgagacaaacgagtaatataatcattattcagccaattattacggaagaacaacttgtcacagaagcccctactaaaactgtggaaatttgtcacaccaagaaaacaactacaaaaaccttaaaacaaaagataaaagatataaataaacgtaaagaagaagtttcgcaatcttttcaacatgatttagacttcatcgattatcgtgtgccacaatctatgcgtatggaattacaaactgctttttcacccaatgtgattaatgaatctttcaaaaatgccagaaacattgcaaagaaggctgcaaaacaatttaatttattagcagatacagatgtatttcacacccttcttgcaaatgcttcttctgttttgtactttaaaacacataagtacgagcataatggaaaatcgatgaaaaatcctattggatactttactcgaacgttcaaaaaaatcgtctataactacattgatagctttagagagatacataaccttgcaaatcgtaaggcaaataaatataatggactagcttttttcaaagaatttattgatggttaacttgttatgtcttaacaaccatttgattcatgaaatcgtgaatggatttagcttgaaatatgcgaaaatttgaagaggagatgtcatactggctatcggtaattaccagaagagaagggaagtatttcgatttcttgggttgccatggttcttgttgccattccaaactatgaaagtaaaattcatatcggtttaatttctcttgcattactttcttactgtataccgaattctgcacttctatgaaaaatggagattgtcgccaaattgcaaatatgtctggctccatatatgctttaccatacttcggctcgactttaaacaatttaggcttttcgtactgaagaagttgcttatatacattcacaatagcaaggaagtgcggaatcttttgacttgtttttcgaatcggactcggttgtggaaagtagatatatggtttctgtaacacatttacttccacactcccatctcgacttaatcgtttcataaccgtattgcaactggtcacagctttcttgagtccttggaaatgcaaatcgataatatcatctcgtgataggcatctaaagcggcataagtcttttataatcgctttatctctactcttcatgttccaacactccaaacaaaggaagttcttgttgtagcgaattctgaaacgttatatcttctttgagtaaacggtaaggttcaactatttgctttgctttattaagttctaaataaggagcttgcactttctttaatccatttaactttaaaatcatttggccagattgttctaagtgttctgatccagatgtacccataatattactattaattgtgttatcgcatttaaagcccattctaaccgtcatatttagctttaacttaccatctaacacctttgcatctggtctttgcatagatagcatgaggaatacgcctagtgcccgaccaactgccgatattttttctattgtcgtcatacattctttttcatcttgtagcatcgctacttcatcaatagctaacagaatatagggtttctgtttatcaggatttaatttattgtactcatcaatgtgatccacttcatattcttccatgagctttctgcgttccctgatttcattccaaaccttatgaagcatgactttcatttcaatttcttccatgcacacttctttcacatgttttactctacgcaagaaatgaaattcagaatttttcaagtcgcctaggtacaaatataatttatcaggagacacgcattgaatgagtgtagatagtacaacacgtaccatgctactttttccgctacctgtttctcctgcaatgagtaaatggggtgtattggggtttaccatatcataaacaagcatgtttccaaactggtcacgccctactacaataggaagacggcattcttttatgaatggctgccattgcttataactgtagttgtattgtttcaaaccacaatcagaatgaaatacattgagcacaaactttttaatatctccctcaattgctacattccgtccaaatatttgttgaaagcaaaaccatttcttttcaattgtctttggatctaatccgttggggatagtaaatacatatttcacgctttcgtttgaagaaaaaacagcatgaacctttggataaattgggattttccctccacgtgtttgatgttccgtatataaacctgccttttggaacacctcaataatctggtgctttaaagacctcttatgaagccattcttttatgattcccatgacaagcctcctagaacataattacaattcgaacaaatacataggtaatgaatcccactccaccaattttcacgccataatgaatcccattggataataatttagccgctgatacataatcatttcgtacaagatatctttctaacatgactgccccagttaaagccgttcccattatccctaatgccagatacgtatttaaaatagaatccgacatatgaacaaatgctaacggacttaatgaatgatatctttgtattttctgctctttcattttgtatgatccatccataaatgaacgaaaagggatgacttgctttcttgtaaacatagactccactcctcgtcatttattttttatcgtattccgcacaagactctgagcaatacttttttccattccatctccaaaacaaccaatcggataataaacatttacaatactcacaaatttcttctgatgctgccatcttgatgttcatttctttcgcccctctataaacagaatataaaatctagataaagtaacgcttcacacactcattaccatggtagcgttaccttgataggaaccctggtagctaccgtggtagaaatctaaaacttaccatgatacctaccatggtaaaatcatctgttcctaccttgatagctactttggtaactggaacttctcttaccgtggtaactaccttggtacatcatattagggtgggctcggacaatttctcaaaattttttctaagtttaaaaatttgaggaattggtcattctgttgatgaggtgagtttaaatgttcggtttaggaaaaaagcgtagtaaattcgggaaatggttagataggcagggaattcaacaaattgaacttgaaaaaaaatcaaaattaagtacaggcactatatctagattatgtagtgatacaaaatacaaacccaaatactctacaatatctcaaattgttagaggtttgaagaagttaggaaaaaatatagatgaaaatgatttctggatgtaattagaaaaagaatcttacaattttcttcttaaattggtatgatttaattaatttaagggggcggttttatggagttacgaaaaacagctgatggggaatcattcattattgaattagaagaaaagaaaagttctacagctaatcagttgaagagagttatatattttttaattggatctttcggtttattaatttcagtagtgttatgctttaccataattggaattttaccaggtttaggtttaacattcttttctgcgctctttatatattcagctttaggtaagcaacttgtaaaatgcccaaactgcaacaaaaaacaacctgttgtacataaagctgagggatttgtttgtcgtagatgtaacaaacgtactcttgttgaatggaagaaataaaagggccgtcgtttgacggctctaatttttgttcataaaactattcttttgtataaaagtatttaagtcctttagcatctaaccacgctgttgctttatctagctcgctaccttgacgataatccgactcaaaataaacaagcccctgacgatctccacgagaaacaatttttgaagtgtatccaagcgtatccatcatttgaatcatttctggaattaaatttacaccaaattcataagtaatcaccttattatgtttgttcacgataatctccactccttcttgtttatacgatttatttgtaaaccaatctaacgacttgcttccaattaatttgtttaaatcacactttccgataccaggaacacttcctgtttcagtgtattgccaaatatcacatggataagctggtctattcccgccatatcgaggaatccatacaaagtcagattttacatttgccattccgaatggagcatacatatgatggccaacatataaaccgactttttgagcacctaatcggcgtagttcatcgataaacgcttgcgtgccggctctcatatcatccattgtttttacttccacatcagccacccagactgttgcactcttgtctccacgattccagaagtctcgagcttctacacgtgcgtcattctcagaaacgaaacgacaaaatgcatagttaccaaaaggaataccatgttgcttcatagcttgtacataccccttatataatggatctacataattcgaaccatcttgtacacgagcgataatgaaatcaatgtattgttttgccacgggccaattaatatcaccattccattttgaaatatctacagtgtaacccattatttatcctctccttcgctatttacatcatgatcagaccaaatccccaatgcgatacctactgtcaacaaataaggtgctaattcatccaaaaagctcttagcttctggcacaccaaatttcgtaaataaaaatccaagcaaagaaaaaaccgcaacccatgttttccagttgcggaatcgttttttgatattttcttttgattgattcataactaatctatctccttttctacattatctaagcgcttatgcgcttgtttggcactctcttcaacccttgtaatacgctctccaagtacaatcatttgcttttcatttgcctttaaatcaatccgaatatcatcaactcctttactgatgtactccaatttcgcgtttgtttctgccccttgtctaccatctgacttaatctctttcgagcgattcagtgaataagacatatatcctatcaatgctgacgcgattgcgataagtactcctacttcaattgtcatttcttcactccttttatgctgcaaagtaacttggatccattccaaatatttctgcaatatcttcttcgcttctatcttttagataagactccgtagttgagatgtcagaatgattggcgagtgattttagtttttcaagtggtacgccttgtactttcaagttatctaatctgctatgtcgaaaacagtgaggattcattttaaattccttcccttccttttcgttcagcatcttagcaaatatgtcgcaccaataattaaatacactcttgttcaatctttttctctcaccattcttataaacacgtacaaacaaatctggaatagtatccttacctcgctgttttatatataaacgaatacatttctgcacccggtgattgtaatataatctaaacttcttaccgcgttttcctcgtaccacatttgtataatattgttctgttaacccttctttttgaacctggtaaacctcattctttctagctgcgctgtaataagaaagcgctaaatacgtagctaacatgtatttttctttttcaagtaattcatcaattaaccaattaatttggtcctcagtaataaatgtaatttctctaattgggttcttaggtaaaccacgcacccttgaacctacattaaactcgtaattataatcatcatcgtctgcacaaaattctagagctgaacgcaatgcacttatcaatccattcacccgagcattagacattcccatctcctgaaaaataatagataaatttcggatgtctttacgtgttatttgtgtatccaatatcactagcgcataagaggaaatcgattactgcatcgttcacattttttttatcaactatcttttttaatctttctatattctttttacccgtctctaacaaaattcctaaagaaattatccaaagcatatatatataacccactttgctagtccctgtatgctctaaatcatctatcgcattataaaaatatacttccattttactaatgtcttctcctaaagaatacattgccctaatatcgttcatctcatgtataaaattcgacaaataattttctaatataatacttttgttatcattaggatatctttgaataccatttttttcatcttcttctaaacttttaatctcttctctattttcttcgataaactctttatgatattctattccccttttacatttttcttctatacataaatgatctctcattctttttaattcctcctcgcttctagattatggccactctccaacgatgttaccctttgcatctatcttaaatgttttaacctttccactactatcaacttttgataatactctttcaactttacctctttgcaaggctttcgtaatctgttcagctaatacttaatctccctcaacagcttttaatattctactttttccagtttcagaacctttcaaccaatcatttgacatttgtcgtccatctttagttttccccaattgtgaactaccaaacttagcttcatctataacgtatttgatctttgattctgcatttgcattttcgtataatccatcaattccttttactattttatcatttatgcctgatggtgcactttttccgactggctttaaatcaaatccagcttcttttaaactttgattattcaataaattgtcactagattttatttcaccataattccctttttttctttttttcataatatttttcttggcttctacaacttttaattgatgttcatttaagtttctagcaacataatgctctctgctactttatcaacttgaaccataccctaaataaaaagcacttgttgcctttagtcgacaatcaagtgctataagtacatatttctgttacaagcgtaattaaatattttttgattattttaacaataattatctctttgtactaatattattttttcgcatagagaatttattcatttttaaaatgaaccatgtcataaggataataagaaatatcttttaatatactatcatctaatcctaaaattttcataattgctccactttcaaaactccaataaccaaaatataatttttcttaatgtttatggcattcataccataccatattattatgcccaacataccattgccctaacaagtattttttcatgaattcacaagattttgtattatcattacacaaaataacattaatcagacttttaaatggcttttcaaataaccagctatattttcgaactgtaatcacttcttaacaactactaatctacctctattatttgtatcccttctttggtttctggacaatcattaatgcttctttttaatactcatcttcaaataaacaattatatatagtaacacctgtttcctttaactctaacgaaacatcctccacttcaatacttaacgtttctttatcaagattctttattccgttactatctaataattttaaaatactacttcctattttcttagattcatcattgtatggcgaggactcttcaactagctcgattgtaccattagtgtatctatatcttaaatatttaaccactgcatatggcgcgattgccgaaatcattagcattacacaattaatttctgattgcttccgaacatactcactgaattctacactaccaaaacgaaatttcacatctagtggtagaagaatgtaagaaaaacatgatgaataactaaaatcagtaatattatcaacgtttatatttgatattttattaatttctccatcccagaaatgtttatcaacaaatttccccaaaacatattggaaatcaccttgtttatataatttattaacaacttttagtatctcatcactcataattattctcctttattgtacagggtatccatgtatatttcctttaccatccatatgaacctttaccctcgtttctccatttggacctattggttttccaaaatcatgtactctaacacttccatctggctttactggtgttcctttcacccatgcttcttgtgtctctactactccattcttccctgctccccactgcgatttggttgagacattattcccatgaccaggaacatgtttaccttgttttcctgcatcaacttttggagcccctgaaacgccagcatcaacatgtccttgacttgctagtttatcattttttccaatgttccctgctacactggctccctggccaccatcaccagtacccttacctccaccagaagactcgattctttgaagagtatccttagcattttgaatcgatttatcccatacaaatccaccatgtacaaaaagacttgccccagtagctgttgctgctatatctaatggaataacaattggtgacgctaatccgccagttcctacttctgcgacgatcgttaagaaattagatccgcctatgagcgaaatagcttcaaacatttctacaatggacccggctattgatataacatttccagccaaccttccagcttggtaagttgtcttactttctaatttatcattctcatgtggttgtagtccaaaaaagttttctagtgctgcatcaccagcaccttgaaaaaattcgataactccatgcaaaaatgtttgcgcataaatggctgttttttcatgccatgatctattgtcttcctgttcttgtaagttcatttcttgtttgtgcaaagtaatttctttcatctcgttttttcgagctgtttcttctataatcccctgaatcgaactcacccaatccatattcaacccttgtgtactaaacgtcccactcacaggactaaatcctttcccgctttgcacttcagcgagtccggctgtgatgctagccgctaattggagggcggtgctgtagttgttgctggatgaatgttcgaattcttgtaaacgctctagtttttcttccagtttttttctcattgcacctaataccgttacaatcgcacttactccgggcatcggtgtaagtacttctattgcttctatacttgtaatcgattgattaattccccgtatttgttctcttatttcttgttcgatcacatctgtcgaagcaactttcgcttggaactcgtttggaaatgcttcgttttggcgaattaattcttcacataagcatatgattccttgcgctaatggccgaaatgtttggacaaggtaggcttttgcactactgtatgtttgtccttgtaatactgtgtctatcgcaaaggcatcaatagattgaatggcttgttccatactttgaatcgtagcattacatatagcgttcatactttgagtttgactttgtacttctcccaaatacatgtttaaactcatgtattggcctccctttgtagttgctgctgttcataggaaaggtcgttttctttctcactgagatgccgtttttctttaagcaacgtctctttttcattttctaattcgaatgtaagttttctttcatactgtccgatttcttgccgcatattcgtaaaaaggtgaaacacttctttgtcgccgtgccaagtttctagtattcggttaaataaacgattacttctatttttccattcatgaaaactaacctcagctcgttcttgattttgcagcgcaattcggttttcattttgttcttcaaatataattcgtaatttttgattacattgactgattctcgtttcaatttcttgactcatcttttctccctaccttttcccctttacgtaggttgttacattattgaaaagtcttttgaagtcctgtatccattttctcaaattcatttgctacggaatggatattatcaattgtttgttgaaaagcagtacaaaattgtttcgtgatctgtaaattttgttgatttgcctcttgtgcttggaagttcacagatagtgtcgtacgcgttgccttatttatagagcgactagtagcactttgcattctatctgaagcatttctcattttcgttgcaagttgcgttgccgtatgcaaattactttgaaattctcccattacttactcccctctaccttttatttacaagaaaattataccacggaaaaatatcccaataaaccgaatgttcgaatttaacatacaattcagcactcttactgaggatgcgagcaacgcttatctatcaacataactgagtccaaaatggattctacttatacaaaaaagatgacttcagccatatgctaaagtcatctttttctaccttattattttactaattctccattataagcttttatattaagcggagcagttaaaaattgtgctgctttactaacgaaagatgtgaagtgttcactcgtattatggctcgcaactgctgcttcatctttccatacttctaccatcgtataaacactttctttttctgtatctttatataaatcataagatacatttccactttcttctcttgaaccgtgaatgagtggctgaatttcttctaaaaatgattgttgttttgctgggtctacttgaaatattgcgtgaataataatcatggtgtttcccctttcatattccatatatttctatgacctaattagattacttccactcagcaactttgtcaattggaagacgtactgattggtaaccactatcagcagcttttccgattgaaattaacattactggtacgtaacgttctttatctagtccaaatgcttctgcgatttggtctttttcaaatccaccaattggacaagtatcgtaaccgtgagcacgagctgctagcataaattgcattgctacaagaccaccgtcaattagcactgtatctttcatgacttctggtgtaaccattgagaagtaagctgaaagttttttcatttgatcttcttttacttctgctggcattaaaccgcgttctactgctgtaccgtaaatttcttctgcgttatcaaagttatttaaatcaccaaataaagcgatcatcgctgaagatgtttctacttgtgattggttgaatttcgcaagtggcgcaagtgttgctttcgcttcgtcactttcaattactaaaaatctccatggttgcatgtttactgaagatggtgcaagtgttgcttctgtaagaatttctgtcatttcttctttgctaattttcactgaagggtcgtacttacgaattgaacgacgtcctgttaaaatttcgttaaaatcatttgtttttactgagttagtcatagttgtattctcccttttttataattcttttatattttcttgaatgtgatttaacatatttaaaagattatcgcgttcttcctcacttaatcctttaaatgcagatgctgcaaaacgttctttttcctcttgaaatgcttgaattttatttcgtccctcttcagtaagagaaactaacgtaattctgttatcatctggatttttacgtcttacaatcatttcattggcctcaagctgctttaaatgccttgttatcgcagcattatcaatattcacttcttgttgaagtgctttttgactaatttcacctacttcatataactgaagtataagctctaatcgagactggctcatacccgtacacccttcaaatttcgaacttacttctttatttagaaagtgtaatttatataaaataatcgcttcttttgagcatgaacttgtcaaattaaccctcctttacaatcaaaataaaaacatttgatgtatcaatagttgatatgtcaattaatataatctatatcgatttagaatgcaagcattttgttttcattttatttttttcaaattaaggcgctttgtagcgttacaaataatgttaattgcactataataatactaatttaaagaactggagagtgattgataatgcggcaatatacaaatagaaatgaggaattgaaaatggaaaatgaaatgaggatattcacaaatgacaacaataaatatagggattgtcgcgcacgtagacgctggcaagacgagtttgactgagcgtattctttatgaaacgaatgtgattaaagaaattggccgagtagatagtggtaatacacaaactgactcaatggaattagaaagacaacgcggaattacgattaaagcatctgtcgtttctttctttattgatgctgtaaaagtaaatgtcattgatacacctggacacgctgattttatcgctgaagtggagcgatcattccgcgttctagacggtgcgattttagttatctctgccgttgaaggtgtgcaagcacaaacaaaaattttaatgcgaacattacagaaactaaacataccgactattttattcgttaataaaattgatcgtagtggcgcaaacactgaaaaagttatgaaacaaataaaagaggttctttcaaatgaagcattccccttctactctgttctaaacgaaggaacgaaagaagcccggatcattgaatacaaatcatatgacgattgtatggaactgttagcaccatttaatgaatcgttacttgaatcatatgtaaataacgaaataataccggacgcactattaagagaaaaactagaacagcaaatacagcaagcgaatgtgtatccaatctttttcggttcagcaatgactggtatgagcgtaacagaacttcttgaaaaacttccggctctcattccaactcttacatcggcacaagaggaaccattatccggtgttgtttttaaaattgaacgtgaaccttctggagaaaaggttgcttatataagagttttttcaggtagcttacatgttagaaaatatgttaatatacagcgcagtaagtctctattccataaagaaaagataaaaaaaatgtgcctatttcataatggagataccgttcaaacttctaccgttcctagcggtgagttttgtaaagtgtgggggctgaatgatattaaaattggtgatattatcggtgaacgtacggattatataaaagatattcactttgccgaaccacaaatggaagctgccattgatgcggtacctaaagagcaaattcataatttatacgctgttcttatggaactctgtgaagaagatccgctcattaaagtttggaaagacgatgttcataatgaactatatattcgccttttcggtgaggtacaaaaagaagtaattgaaacaacactttatgagaaatataatttgcaggttaatttttcaaatacgcgagttgtatgtatcgagaaaccaattggcgtaggcaattctgttgaagtaatgggtgaaaaagagaatccattttacgcaacaatcggattcaaagttgaacgtggtgaacttaattgcggtataacatataaattaggtgttgagctcggctcactacctttagcatttcataaagcgattgaagatacggtatttcaaacgttaaaacaaggattatatgggtgggaagttacagatattatcgtcacgttaacacatactggttatgctagtcctgttacaacagcgagtgactttagaaacttaacaccgctcgttttaatggatgctttaaaacaagctgcaacatatgtatatgaaccagttaatgcgtttgaattaactgtaccggagcaagcaattagtaccgcaatgtataagctcgctgccgttccagcaacttttgcagagcctatattcaataacaattcttatcagttaacaggatcattacctgttgcgaaaacagagagtttcaaacgaatactacattcatttacagaaggagaaggcatatttacaacgaagccagctggtttcacaaaacttatggctcccttccctactcgaaaacgtgttgattataatccgctgaatcgtaaggattatttacttcatgttttgaaggcttattaaagtaaaagaggtgcaattcgcacctcttttgcatgtattaataggttagtttgtcctaacaacttctttaagttttcctattattttcgctatagcctcaattgaattttccgtttcatatcccccaacatttacagaatgatttgcatttttgacaacttcaatctgtaaattcgttttatataactgatcaatttgatctgcattgtattggtgatctttatccccaataactaaaaacccttcgtgtcgactatgtaagataaaatcaaaaattgtatcaaacgtcagtaaaggtgtaagtagtatcatttttgactgcgcgaattcttctctcttcattaaatcatttgcaatcggaattgttccgaatgacttccctaaaaacatagtctcgttgtattgctcatcttttaatacttcatttattacaggattaatatcatccatcattactttcgttacttcttccattggtttattcattaattgtccatcataagaataatgaatatgtacaacatctattttatgttcaagcattaacatcgttgcgtaataaaataacggcttatcataattgtatcctgaacctgaaaacataaaacaaaccgtactagaacctttttcgatatgtgtgtaacgaattactttgtcatttatatgtacctcttttttagtccccttcaccgttttctcctccgaatacgtttacttttgtaatacgatatgttctgtgtgaactgatacatcctttactttctcttttataaatgcaggctgtaagttatatgtatgcagttcttctactggcacccatctaaacaaatacgttctaccctcttcttccaaaatatattgatccgctccactcgcaggtaactcatgtagctctacttcataataaaaactaatttcatgaaactttcgctcagaaagtgtaaagaaattttctactgaccatattaaccttttccttttaataggaacacctatctcttccgcaagctctcgttttaatgcatcttcactattctctagcatttttactctaccgccgggtacatacaaaaaatcttcaccgtcaccttgcagaatgagtattttattatcatgtttacaaattgctccaacgcggtaattaaaacatgtttcctcaactttaaatgtaagatccatccgtaacgcccccttatataaatatcgaattattacaaaacaattatgtaattactgtacaaataaggttactaaatttatccactccattcaatgatttttgaattttctaaactattatttttcatcattacaagtgtatatgcatatgttacaatcatattgcacactagaaaacattatgggggtacggatggaaacgttattaatccagcaaactgagaaatcaaataagttttggaaaatcgttgtgaaagaaaaagactatgttgtgttttacggaaaaattggcacagctggcagtgtgaaagcgaaagagtttgaaacagaagaagaatgtatgaaagaagctaataaactagttgcttccaaacgtaaaaaaggatatacagacccgttgcctggggaagattacataaaagaaaaaacgataacagaagaagaattttgggaactacttaatcgtgcaaaaacgaaaggtgaagaccaagaagaacaaatagaatggcttacttcccaccttgctaaacgtacagtacatgaaattgtagcttttgatacgcatatgcatcgtcttttgaaagattcctatacctcccgtttatgggcagcagcctatattattatgggtggctgttcagatgatactttcgattacttccgcggatggttattatatcaaggaaaagagacatacgaagcttgtattgaagatccagaacgattaattcctgtattagaaaatttgagtgagtatgacgtcccagaaatagaagaactttctttatatttcggtttcactgtatatgcagaaaaaactggtgacgaagatgatacttactttacactttaccatgtcttatctaatgaagaattcgacgatgtagattttgaatttgactggaatgaagacgatgaagaaggtttaaaaaagatgtttcctaagctatgggaactgtatggagaagaaccgtttgagtggtagattcattattcgtgaaaaagtgccttgtttctttagtaacaaggcactttttttgatactatatttaaattatcatctttccactctcccaccactccataaaagtctttaaagaaagagcaacccacgttctactatcattttcatggttccatacatatatatcatctctttgtacttttccattcaaaatggaatagccaaacaaatcaccatttcccccatcagcaaaaaataataaacagtcaaaaggcatgtataaatccttaaaatcaactatatttctcatactcatattttcagttttaatttttgaagcagaccatataaagtcaccgtattcaccttctataccgtttgtttcctgtaataattgatataaatcattcggtaactccacatgtaaacatttttgtatatcagtaagttcatccttcgtagctgggtttttcaagcttaaatttgatgagatactgtgaatggtgtctttccacatcaccttttcctccttatgtgcaatcaagcatactcaaagaactccgctaaatttattgataccatctttctaacaattccttctccctctcgcctgaaatacctgcttttaattcccattcttccgtactctccatccactcatacacatctgtaactgtctcgtctattcttctaaaagtaagcccttcattaaccgcactttcgatacaaatagaaaacccgcctctccacggcttcgtctcaccatctaatgggaaagtttctggaatccacaaaggcatttctgtccaaggctgcacattgtgttcactcataaacgattcgtctacccaaacaaattcagcatcgctattcgtaacttttttacacgtatttaacagctcttccatcgtcaattcatcattcggacctgttatattgaatgtacctgctttattattttctgccatgttgagtccaaatctcgcgacatcttttatatcaactatctgcactggacgattttttcttcctggaactaacacgttacctccttttgctacacgctgaatccagtatggaagtcgatctgtataatcgaacattcctgaaagaagtcctgctcttacgtgtaaaacacgccccggccaatacttctctgcttctttttcgcataatactttcagcgcaccataatgctcataaggagatatttcaccattctctacagcctttatttgctcttccgtcggttcaggttgtaatatatagtcttcttttatgtcatgcggaatccaatctttatatacggaaaggcttgagatgaatatatagtgttcaatattatctttaagcacttctccaacattcctaatatgatgtggagaaaatccacatgtgtctatgacaacatcccacgttcgattttttaaacttgatacatcgttatttctgtcaccggttaactgctccacattagaaaaaatttctttgtttgttcctcggttaaataacgtaatttcatgccctctctgtaaagcctcatctacaaatgctcttcctaaaaatcgtgtaccgcctagaattagaattttcatggttctcccccattcgtgattaataacccttcctaatgtttaacgattttttattgaggaaagttacggggagcgtttaaatttttctacaagttcaccattactcttttaaaagtatatactctttgattaatctccatctatcctttatttctggcacaacttcagaagccatcaccaccaccaattccttctctggaatacaacaaatcatattcccaccatcacccattgcacaatacgaatagacaccctcttcttctcgtaaccaccataagtaaccatattgatttgaattcatcgctattgattcttttatccatgattttgatagtatttgttttccattatgaataccttcattcaaatacagctgtccaaacttagctatatccctaaccgttaacgttagtccccagccgcccgtcgaaataccgtttggatcgtgaacccatcctttcacatcttttccgaataagtcatcgaatccaaatgctttcatattgtagtttggaatttcgctcatgccgagtggttgaaataagtactcattcgcaaattcacgtgcacttttccctgttgcattcgtaatcattgctgatagtacatgcgctcctgcagatgaatatttaaaagctccaatctctccaccgttccccattctatgaagtgtatactgtacccagtctggttgtgtacataattcttctaacggttcctgccagtctacaaaagggtatggagctgtcattgtaagtaggtgtcgcactgttacttcagatgactttactttatattcagggaaaaactctattactttttgatcaacactttttatatagcccttatctatacatattccaattagcgcagagattatcgtttttgtaactgacgctacatgaaatgtatcattttgtccgtaatcgttataatatttttcaaaaataacattacctttccgcactactaacataccattcatattttcatattcttcttttataatctgatctaacttttcagcagttttcattattctttcccctttaacctatgattaaaaaggttcgataggtacatatatatcaactatatgtttatgctttggatgctgctttggattatttctatatacttcaaaaggatacgagtctctcggtttatatccgctatttggcagccattcaccgtataagaaatcccatgctcctttatattcatcttggaatatttcaaaatgtcctactgcatattttccagaaggtattaccattattccaacgtcgttcgtttctactgtggattcatctgaaattgttacacatagacttgttcttaaatgatagtcctcagtaaattcatgatgatcgtggtaaatggttaatactttcgtatcctcaaatacatgatagtttttcttcgccgcgtaacgaaataatttttctatcatttctggaaaagctatagctaactctttatatgtacctgtatgtcttatgtatgcgacgtttatatcgtccgctgttacaatttcaacatttcctcgaaccttcttacattcattgtattgaggaattccccttacgtctttgcaattcttgctattatcgtttcgatattgagacggacttacaccgtaatgacttttaaatgttcgggaaaaaactgctgaatctgtgaatccgaagtgatacgcaatatctgtaatcgtcatgtctgcgcgatatgtaagtagatgtgttgccctttctagtttcaagcgattcacataccgagataatggctcatcaactattcctttaaaaatccgatgaaaatgatacttcgaaaatcctgctatatcagctagctcttcaatggataatgaactgtctatgtttgattctatataatcttgaaccttatgtatgcgtcttacatactcatttctactctgtttattctccatactctttatctcctcacaacaaaaagaaccatcctagaatacttttaggacggctttctattcgtaatagattcttccatattctattgttaaatcgatataatttcactatattttttaaattgatggtaatgtggcagtatcccgatttaattgaaagaaacaactatttttttatagccctacgcaaattaataatattattgggatttagctcccattgtctcataagttctttttgtcttgtttttaagtcttcaaatggttcttccactatgtcgattttattaaatttcccttcgaaaactaaagcattttttatctttttatatccaccaaaacctaagtcatcatttagtaaccagactactctctgtatttttgcgaataaaataccacctgtacacattggacacggttccaacgtgctataaatagtaaacttctcattttttatttttgcatcaaacattgcttcccctgcattgcgaatagcgtctatctctgcgtgagctgttatgtctttttgtggatgcactctatttcttcctcttgcaatgacattattatttccatcaacaataactgctcctactggatatgtgttttcttttaatgccttttctgcttcttccaatgccatctccaaaaaatatctatctctttcaaaatgcatataaatccccttcttttgatgaaattattttatagaaattgcttttgacatcccactcacttctatcaaattaacaaaataaaaaaagatatcattatgtctgcaacaacagggcaagaatggtgttttgatataaacttaatttaatagaatttgtgatacaatccaatcgccattaagctaagaaaaacaaataccctaaaacgagaaattttaagggatcataaaattttcaaatttttaattcttgttttgacgtttcttttgtatgctccctataaccccaaatacaatcgctactgctaaacatacgattgagaaagtttgtaatacgtttgtcgaaaaatagcctacccctaacactactgctaaaacgattcctgctactaacattctccgttgctgcatatccatgcaatcattccccttttatctacacatgtttcaaaaataaaactctactcccgccattcccatcataatttgtatgtaccgatacaccctctacctcatcatccccagcctcaattcgaaaaccgatttcttgatgaaactgtatcgactttttattagttggtgacgtaattgcttttacaactttacgattatttgcacgagcgacatcaaagaaataagaatacaatgtcgatgcgattcctcttcttctatacttcggatttacaccgataaaatgaacgtatgcttcatctttatatgtttgtgaaaaaaatccgcataagaaacctaacgtttcaccctcttcttcaatgataaaactcgtttcttgaaagtgaacaaaaaacagttttggcaacatggcaaccatgtctctcccgccccaccaatcatttaaaactgaatgaatctttacataatcttccccttggatatttcttactcgcatatgtttctccctctcactcacttcattttttcataaattttaatgactgtttctactaataggatgaatacccatatcccgcaaaatacaagaacagactggaatatagatccaattatcataacaccaactgtacctgttattgaaaaagatattccaccaagccctggatcttgtataaatgctccagcagaaaaagcagttataattgatactattaaataaataacactcgttatttttaatatctttatagaaagatacgaggttttttcttgttccacttgtgataattcgatttccccgctctcaattcctttttgcaaacagtcttcacatagaaattcttccttaatttttttaccaccgtgcatcgtacctgttatttctttacatcttgaacattttcgatttatcatgttgttatcactccaatctgttaagattatacttatacaattctacgtttaccttaatattccttttatgtattttatagagaaaggtcgtgttttatgatttcaaaactcacatttggctctaaaaaaattaacgttcattatacattaaggcctagttgttatgcgattatttttcaatcatcttcttcaaagattgctgttatccaaaaaggagaccgttactttttacctggtggcggtatggaaggtaatgaaacaaaagaagaatgtttgcaccgtgaactactagaggaattaggatgggcaattaaaattgatcagtatatcggtaatgcggctcgatatttttatgcagaaaaggaagatatatattatttaaacgatggatttttttatattgcgaatatggtgcagaaacaaactgaaaactgtgaggaggatcatgttctaaggtggatgtctccattgcatgctatagagcttctcatacacgatcatcaaaaatgggccgttgaacaagcgcttttattacaaaaacaaaaaggatctccttctatatgaaagagatcctttttactgttaacttacttttttcaaattgagagcaggctttttcattccacctttttttacaacatataagccgataaaaataataagtccgccaacgagttgcatcaaattaatttgctctccaatggttactgccgcaaagatcactgcaaacaatggcacaagatacatataaaccattactttcgttgagcctattttactaataccgacataccacattgcaagtccgaagatggtcgcaaagatgattgaatatgcaagcgatccccagcttggcgtatctactggccacgttaaagaatttacgttgaataaacagtatataactagcggtacaattccaattaaagtagaccatgatgtgactctcattgcggagtattttgtaataagaggttgcgctaatattggataccatccccacgcaattgctgcgactaatccaattacatttccgagccacgcatactcgtaagtagctcctcctgtatgtcctgttaataaaacgaatgctgcaccaataaaggctacgattgaaccaatttgtactttcatcgaaaaacgttcttgtttgtgcaatactgctaatatccctgtaaaaataggtgacattgcaattaataatgaagcgttcgttgctgaagtatatttcacagatagcataaacatcgtttgatacattgtcgttccaacgatgccgactgctactaatcgtaaccaatcttttctttcaatacgtaatgagcgttccatcataaaagtaataagtaataataccggtgacgctactaaaaatcgtaaactattaaattgaatggatgacatatatgccacgccatactttcctattgtataatttgctccccatactaatgcaacagatactaggagccattccatttgccatcgtttcatccgaatctccccttccatatttagcatagtaaaattggctggatataacaccgtccaattggctgtttttttacccagccaatttgttatactgaatgtatataagagatgcggaggcgtttgtatggaatggaagctagataacgacagtaaaatccccatttatcagcaagttgttgactttattgaaaaacgtattacatacggagaacttcctccaggaagcttcctaccttccgaacgaaaattagctacacagttaaatgtaaaccgaagtacagtaacgactgcttataacgaactacgtgctatgggaattgtagaaagtacgactggtaaaggtacacgtgtaagtacacatatgtggggcgtttctccaacattaacgccgaactggagaaatttcgtagaaggcggtacgttcttaccaaacttaccgttacttcgccatattcgggcagaagtacaacaaaatgaaaatattattgatttcgcaaacggagaactcggttgtaatctctacccacacgatcaactacaaacaattttacgagaacaaccgttaacacattcattaagttatgatcatccacaaggctatcttccgctcagacaagcggttgtaaaatatatgagggaatatttaaaagttgaagcaactgagcaatccattatgattacatctggcgcacagcaagcacttcacctgatcgtacaatgtttattaaatccaggtgatgctgttgctttcgaaagtccttcacactgttattccctgcctctattccaatcagcaggtattcgtattttcccattacctgtcgatgaacatgggattaacccagatgatgtacaggagttatatagaaaacaccgtattaaaatgatctttttaaatccaaatttccaaaaccctacgggaacgatgcttcatccaaaccgtagaaaaaaactattatcactttgcgcagatttacgaattgcaatcgttgaagatgatccgtccagtttacttacgctagaaaagaaacaaccttgccctactttaaaatcgattgatgaaaatggaacagtcatttatgtacattctttatcaaaaatgattgcgccaggattacgagtcggctggctcgtcgctccgcaatccgtagtagaaaggttatccgacgcaaggcaccaaatggaattaggtatgagcatattcccgcagtggcttatgcagcagtttttcgaaactgtaccatttcagtcgcatatcgtaccgttacgaaaacaactagcagaaaaaagagacgttatcgttcgcgccctaaacgagcaacttcacgataaaatctctttttcaaacccaaccggcggtatatacatatgggggaaactaaaagaaccgataaacgaaaaacaacttattatgcaaagtttaaaacaagaaatcgcgtttatgccgggtagtattttcggtgcgaaagatggttatattcgtttatcttatggaaaagtgaatattgatcaaattgaggaaggtatttctcgtttgcgtgaggctattttagtttgtgaaaaataactttacataaagctctatcgtttgacaaaagaaaaatctaccattattatcaacacgaacctagttaccccgcattaacgggcaataaaactcccagctcaaaattcagctgtaacaaagaagttaggtgggagattaactgcccgtaaatgcccgattggttcaactaataatcagtggagggtgaatccccccactgattaaagtttcactttataggagtggtaaaaatgaaaatttacgttgatgcagatgcttgtcctgtaaaagatgtaattatttttgaagctacgagtgcagaaattcctgtaactctagttactagcttttctcattattctaatgctcagcagcctaaaggtgtagaaacaatttatgttgattccggagcagatgctgcagattaccgaattatgcagttagcaaaaaaagaagatttaatcgtaacacaagattacggtcttgcttcgctcgctttagcaaaaggctgtatcgttctacaccataaaggctataagtatacgaatgataacatcgaacaattgttacaaacacgatatttaagtgcaatggttcgaaaaagtggtaaacgtacaaagggaccgaaaccatttacagcagaagataaagagaaatttagagagctctttaaaagtatgatcgcactttaaaaatgaatcgtctatttgcaaggaaaacttcgcaaaacaaagaagagaatatcgtaatgaacattctcttcttgaggtttaccctttaaaatgaaggtaaattatctaagttattttcttttattccatcaggttcactacgtataatatctctaccatacttatgaaatacgtccacatgagctaacttccctgattttgcttcactaagagcagtcatataatctaactctctcccgctacttgttttaaaagcaatcaaatcaccttcatcatttttacgaacagcaacaatttgttctgctcctgaagtaacttcctgagctatttcaaattgagcttgctcttccccttgatgtaaataatcattatatactttttcaaagtcttttttgtccattaaactcacctccaaaacattttattagtatggttgggaggtgttggttttatgtacttttctgttagaaaaacgaatttttaatacctacgcaaacccttcaaagtctccaatatatcatctgtaaaggctgtactaccctctgtctctaaagctctgaaataaaaacttcttaggaaagttctaatattttgtactaaaatagcatgctgcggatgtcggatgtcttcaacagttgctatactatgtaaccagttgctccactcttcttcagttaaaagattttggtcacgtaaagacataattggctttactaatctctcatcttcaaagtgtacatatacgtaatcacttaatcgaaccttttgacgaacagctgcaagaattgcatatgaaaactcacgattttgtatagtacgcactaaagcatctagtgcatcagcagcgtgtgcagtagagtgtgcccagccttttccttctacgtaacctcttacatcttcttctaaatatacatattccagcacttgttctgctacactgtacagttgttcttcggataacaacggttctctttcatgaacagataaaataagtggtggaattaatccggagaatgcacgtttaaatacagagtctgttcccttttcaccaattttataaaataaataatcaggactaattgcttgtaacattaatcctcttaactctttttgtctaaatacatcatttgtaatccatgtgtgaagcgtactataaattaaatcatcacgtaattcagcatcaggtgatccgatataatctagcatccactgcgcatatggatatgcatctacgtcttctggtacagcataattgttatttttaatttgtagtagttcttcttttagttctagtacttcattcattatatttcttgtcccctttttgcgttttttattgtcttatccccttttatttgcttcataaaattaatttaattataacaataaacaaaaggctatacatatatttctgattatgtattacgctctttcatgaaatataacttctggatttcctaaatcactattcttaaatataacattcgcacactctttcggattatgctcatctatatacattttacaagccgcgtgatacctgtttaaaaacatcttctctgcttcttcataacttccaaaagcttcagtttcccgcttagcaccacgttttctcgcaatctcaaaatttgtatctacaaagattttgtaatcaaataaatgcgcaacgtcttttttcaatagaaacgttccatctactattaatatcatattttgcgtggccaatagcggctcattatgtacaggcatatccgttattaagttatgagaaatcgtttcatactgtaaatttccgttaggtcctaaaggcattaataatctttctttgaaagctgtataatcgtgtgcatcttcataataccctcttgcagattcttttccttttgcatagcgaatcactcttggattatgaaaatcatcaatgctggcgcgtgttactggtaatcctcgtttttttatttcttccgctagttcgcttgcaaatgttgtttttcctgaggctgtaataccgcttactccaactcttattggatgggttaagtttagctttacaatatgatctgcaatttctttgattcgttgttttcggttcatgatatctccctttataattagtttacataatataattataggtaataattcatgtcactatttgtcggtaaatcgatatcctttctcgaatcgctgatatctcgaaaaaatcgttgatatattttaagttatgatagatatatttgaaaaatcgttgatatattattagcttacttccccttaaaccctcgatataaagcagtccgtaattcttgtttgtattcttcaatttctggcatttcgagttcttctgctagtctgatagctaattcaatatcatacggtactcgtacaagttgaatagaaaagctcgctgcttctttttcattgtaagttccttcaaatattaaataggaagcttgtgttatttcaagtgggtttcctacgctaccggcattacataacgttttccctctgaaattttgaacgaatgcttggtgaacgtcaccgtaacaaacgacatctggttttctttccccttctatattttccgtcagatcactattttcgaacatactaatacgttcttctcttgaagcgtgtggttgaattctttcatataaacttctcggtgaagcgtgaaacatacgaatgaatttcccactcatataaaactcgattgaaaatggtaagtttcttaaatagtcattttgttcttccgataattgtttttgatgccatttcaatgcttcaaattcagtcggctttgtaataaaatcatcccagtttcccattacgactacttcacattctttacgaatgatttcaattgcttcactggaatgaggtccttttcctactaaatctccaaggcaaataatgcgctcgattcctcttaatttaatatcattcaacacggattctaatgcttgaatattaccgtgaatatctgaaattactgctattttatccatataaattactcctttatttattaaattcgcttgattgataccattttggaatataagatgaaaaatgattatgatcttctaaaattccatttaatctttccttcatatcatctactaaatgcggtgtacttcgattcgtccaaacgatatccgctgggaatgtcatcgcgacgtacaatgtatacagtttccaaaaatgaagcgatggttcgcctccgaaataaccgtgaacttgtccaaccgcaaatggtttacttattcttatagtaaaaatcgctacgttataaaaatcgtgtattggatcaccaaaatcatatccaccaaaatcgataacgataaattccttattatgaatcatgctatttgctggatggaagtcatcatgtaaaaatcttattggacgatttcccaataaatctttatgattttctacaaaggttaatactggcttcaaatccagaaaattcacctcgtaatctgttagtgcctctatgtatctttcgtatttattccatctagatgtttcccatttattacttgcactttctctttcaattgggtgaatcctctttaatacttcccccgcttttcttcctgccttatactgttcttccaccgataacttcgttaaaccttcttcaccatttatacctcgggtccattcaaatacttgaacacatttatttaatttctcaattattatgaaatgaattaacttgggtgttggaatatgtaatgactctaattgtttcatatacgtatattcttcttgtttacgttcaaaatgaacagcatcacatacttttacaaaataggtttcttgattctttaattcaattttatatttctcatcgaatgaaaagccttttgaaataacagtcgcttttaacatgcgaggccattctagtattctctctatctctctaagcatttcttccacaacgttcacctctattaatatatgtacaaactccctaacacttcatgctctcgtttatttccccctttaaactctactgcaaatggatattcgccatgattctttatgtattcttgcactagaccttctccaaccggttcacaaaactgtacttgaatgtcaccaaacgatacactttgacactcagcattccatttttcatttttcacaactgagcttgtagatagtcccattacttctttccatttccgtactgtttctcgaacattttttactgcgtaatgaatcgtttcaatttgttgcactttgtttttatgttcagtaatcgtcccactgttacgtaaatcgtttcttctttcttcgtccgtttcattccactgtataaagaaaggtaatttcggtccgttctcttcttgcttaacgaataacattttccattctaaaagtcggccatcttttctcatacgtttcccttcaaatggccctatcgtatgtaagccgtacttattaaagttaactgctagctcctcaattgcatctgttcggatcgcgatttgtagcattccttctccattttgtagtttcaccactgtttcttgtactaatggattttctgcttctttcgctttttcttcatgttgaactgctaaaaattctatatatgataaatcaaaataacttaaactattccaagtaccccaattcgtatgctctccgcctaatacagtatgaaatcccagttcctgcatttgttttgccgcttcctccggtgtaccatgaactgtgtgaacgagatgatcaaatcgtaacatgtctttctcccctttctctccatccttttattgtatattttatttttctttcattcaattcaaaaactttaaaacccagttgatttatacgattaatatgtattataatgaaacaaatttaattattgctgattggaaaaaccaaaggcacttttctcatacgggaaaagtgtctttttcatttattattacagggggattatttatgcagaaattaattgtctttgctattattggatttttcgcccaattgatcgatggagcactcggaatggcgtatggggtaacgtctacttcactattattaatgtttggtattgcaccggctgtagcttcagcatcggttcatttagctgaagtcgttacaactgcagcttctggcgcatctcatatcaaatttggaaacgttgataaatatacagtttccaggcttacattacctggggcaatcggcgcatttgttggggcatgttttttaagtaatttgcctggagatataatcaaaccgtacatttccgtatttttatttactttaggggtttatattttattacgattcatcattcaaaaacaaattgtcacttcaaataagcgtatgtctgccaaacaacttgtgccgcttggtttattcgctggattcgttgattcaactggtggcggtggttgggggccgattacgacacccgttcttctagcaagaggaaatgaagctagaaaagttattggatctgtagatacgagtgaatttcctgtttcactcgctgcaacaattggcttcttcatctcacttggctgggaacaagtaagctgggtttgggtatttgccttaatgctcggcggtattgtcgcagctccaattgctgcatggttagtccgcatcgttccgccccatttacttggcatattagttggtggtcttattatcttcacaaatattcgtacactgctttctacatttaaagtggatccaactattatttcactttcttacgttgcagttggtcttgtcgttattatttctattttcattgctgttcgaaatcattccaatcgtcctaacgcatcaacggctgagtatccgaatgatcagaagcaaatgctaccataactataaaaaataccgctcaatttagagcggtattttttatttttctattttccaattaatcatcgtttctgtagcatttactctcttcatatgtaacttttctaaaacacgcatcgaactatagttatctaggagtgtctccgcaattattgtttctacctctcctgttttgaaagcccaatcgattagttctcttacagcttctgttgcatagccctgattccaatatttctcaataaatccatagcctatttctactgtttgattctcgtttggtttccctttaaacccaatatcacctaaaacgctatcatcttctttccgaagaacataccacgccccccatggtaataaagccgcatcttgttttacattctctacatgccctacaatatgcggaccgctattatatccttgctcgttagcgacttgaatactctcttctgtacacggcactatatagagcctttctgtttctaatttcattttgatttcccctttttgcttaaacgttactctgattataacaaataatatgactttatcatgaatgtcgaattatatttttctgaattttctttttatttagagggtttttcaatattttttgcgaaacatttgtataacaattttttctttgcttattgctacataatagtaggttcgggtggagttttgcaagcgtttcctatacaataaccgatattttttgacttttcctaacaaaatatcttgcaatatattcagaaagtcattacaattgccatatattaaaaatcttagcaatatataaatcctcatcaatccgatgaggtagaggttgcgacttttaatagtaaaacggacgagacacagagaatgtcaccgactccgtttgaaaggaaaagttgccgaagtttatatttcttctctggaaatatgagctggggctgtctccgaaaggaacagaactgtcacgtttacaaaattaccgtgtaaacgtggggtgctatcttaacggaagggtatgatggggtggttatttgtgaaacgttccgccaaattcctttggcggttttttgtatttttctcccccgctccttcctaacctacaagaaaaggagtgttgaacatgaatagcgcaacaaatcaatctacctctaaaacgcaaactacacaaggacaaggtgaattaaaacgcggattaaaatcgcgtcaccttacgatgatttctctcggcggtacaattggtaccggactatttcttgccagcggtggtgtcatccattcagctggtcctggcggcgcattaattgcatacgccgcaattggaattatggtttacttcttaatgacaagcttagctgaactcgcagcttacatgcctgttactggatcttttagtacgtatgcaacaaaatttgttgatccatcacttggctttgcacttggatggaactattggtataactgggcgattacgatcgctgctgaacttgcagccgtaacattaattatgaaattttggttcccagataccccttctcttatttggagcggattatgtttagctattattttccttttaaactatttatctgttaaaggatttggtgaatctgaatattggttcgcacttattaaagtagttacaattattatctttttaattgtcggctttatgatgattttcggaattatggggggcgaaactgttggattcaaaaacttcactgttgcagatgcaccatttaacggcggtatcatggcaattatcggtgtatttatggcagctggtttctccttccaaggaactgaattattaggagtagctgctggtgaaacatctgatccagaacgtaatatcccaaaagcaattcgttcaatcttttggcgtattcttttattctatatccttgcgattctcgttatcggtttattaattccttatacaactgaaagtcttgctgcaagtgatgtaacagtaagtccatttacacttattttcgaaaaagcgggcgttgcctttgctgcctctgttatgaacgctgttattttaacggcagtactatctgctggtaactctggtatgtacgcatcaactcgtatgctttgggatttagctcgccaaggaaaagcaccaaaattcttaggcaaattagatagccgcggtgtacctgtaaacgcattaatcgtaacgtcaattgtcggtagtatcgctttcattgcttctttattcggtgacggtgttgtatacatttggttattaaacgcatctggaatgtctggctttatcgcatgggttggaatagcaattagtcattaccgtttccgtaaagcatataccgtacaaggcaaagatttaaaagacttaccatatagagcaaaatggttcccattcggtccaatcttcgcatttacactttgtatcatcgtaattttaggacaaaactacggcgcatttatgggtgaatcaatcgattggaacggcgtactcgtttcttacatcggtttaccactcttcttagtactatggttaggatataaatttacgaaaaaaacaaaagtgattccacttgataaatgtgaactaaaataaagtgaaacgagcaaacaaatttgtttgctcgttttttgttgcaaacctctttgcttccctattgctcctgtttttgccataatagaagaaatataattaaaggttgggatacaatgaacattcgcattactgatgaagcaaaagcagctatacatagattagaacgtaaagacaaaaagatcattcgcattagagggacaatgacaaactcttgtagtattttcgttgatgtcgatttaatttgggatacatataacgcagatgatgttgtatatgaagatgcagatcttatcgtacaaatggattcattcacgaaagactacactggtgatacggtgaaacttgattataagacgacaggttttagtattacgactccgagtgagactttagtttatggattgtcgattaaaaaataaaaattgttttcatttgaccactgaggtgaaaaaatgggtaaatatgttccgttaaaatttttatttaacgaagaattagcagaaaaaatggctgattctatttgtaaacacgatcctactttctctaaaagaaactttgtatcttccgtaacatgtaaagttgaaaatttagagttaaagcatcgtattgaagtaattgcagatgaattacacaatgctttacaaaaagattttaatgcagccatacatatattgctgaaaacattaggaccagaaaatacaacagaagtaggcacatttacatgtatgaaataacgaaaaggaatactgctgaatatgccattcggccttttcttcaaacataccatgaagacacactagacatattgcaacagtggattcatgacgaaaacagccacattagaagattagtttctgaaggtacaagaccaaggcttccttgggctaaaaaaattggagctctaaaaggtgactttaagaacaatttacagcttcttgaacctttaatgaatgacccttctaaatatgttcaaaaatctgtagccaatcatatgaacgatattacgaaagaagataaagaactcgtttttcagtggttacagcaattacgtgataaacagcatcctattaaaccttggattataaaacatgggttaagaacaataataaaaagtggtactttaccaaaagatttttgtttttgagtattttaaacaaaaccgcttatgcttcaaaaatgaaacataagcggttttccttttgaatacagaaataacaaacataaaaagcactttaaatttcttctttatatcattattttactaactcttctatgttattactttccttaattttttcggatgatagccagagtgaataacttgttccatccttgttccttaaatatatgttaaaatccttattatatagttcttctttaagaatagtgactacctttctcaaatcatctattacatatggatcatttctatattttatctcactgtcattgaaaactaatgtcaattcatactctagacaattgccgtctttcgggtgtggacaagtaatatcctcaatttcaaaacgatcattttgaatttcatttaaccttacgcctacttttgtttcagtttgaaccaaatatgtccaataactgcttactgtgtttttcattgttaaaagcagttcttctttcgttatagctttttgcacattttgaaaaggcaagcctatagattcaccattataatcctcaatttcaagtgttgttatctttctattactcttctgaatgaattggattagagcatataaacgatctaattcttttgattcaaattgactgtaatcaatcttgtcactcgtttttaaagttaataataacttatccgttggtttctcctctatatcatcatccactatatattgaaaaacatttttattttcaggttccacgtaacctaattttttaatttcttctagcattggtttaaatttcttatattcctcatatgttttttttccgtattgatattcatcaccttttattcttgaatataagaagccatctacctctactctaaattgaatatttttgttattttttgcttgaacagtatgatatgtatgccccatatttccttcgtttatagcaccccaatgtgttacaatcacatcaattccgtgcttttttttcacatattttttcacctgatcgtcatctttataattacacccacttaaacataagaaacataacaatagtaacattacatttttcattcttttcatatagcaccttgccctcttttcgcataaacaaaatattccatatataaagaatactaaatcgctgaatgttttcaaagaattaaaatatttttacactcggtatatatatctatttcttttattaatggctctaataagttttaatattgataatcgaatataataaaaagaaacctaaatttaaggtttcccatttttaccaacaatttaaattttaatagatattttttagccaagtaataattcgtagtacctgaaacgactcaaaccaagtaatgaaaaacaggacaacaaagaaagagataagtgatatgaattttaatcttccatcttcacgtctagcaatcgctataatactcagaaccactccaattaaaaaagaaatataccctaataggataataggctcagaatagctatctattatcctatttaatccaaataataacattccaaaagtcatcaaggttattgaaaatacactaaattttttcataattcaacctccaatataattttactattttatggagagaataatttttttatgcgtatgaatgaacaattacactataaaagtagataactcaatttactttttcattaaacaactgccttcttttataccctcaaaggattttcactcaattaacccgaatatataaataacaattctcacaaggagtaactttatatgaatctattcgaacacgaaacataaaaccgttccactttaataagaggtcctccctttttcttttctcatcatatcatccattaaaaaaataggaggacataattatgaaacgtgatccattatttttaactttattagaaagtgcaaatacacattttagcggttgggatttttctttcatttcagaaacgggtcgaatgaagagcgagcctttatcgtggtcgtacggcagtactgcttttcagcttatgcaacgtgcagaatcaatgctcgatatgggtactggcggcggagagtttttatctatgttacaaccgttcccgtcaactatattcgctactgagggctacgctccaaatgtgccaattgctcgaaagaaattagagcctttaggggttgccgttgtagaagtgaccgatgatactgctttgccatttcaagatggtcaatttaatttaattataaatcaacatgaatcgtatgctgcttctgaggtaaacagaattctttctccaagtggcgtttttcttacacaacaagttggcggtcttgattgcgcggaacttaatgagcagtttggctcaccactaaatagcgaatttgcaagttggtctctcgaaaccgcatgcagtgagttaaagcaaaatggatttactatcttagatgcaaaagaggaattccctttccaacgcttttatgacattggcgctatcgtctattatttaaaagcgattccgtggcaaattcctgattttactgttgaaaggtattgtgaggaattatatcgtatacatgaaatcatcttacaaaaaggttattttgatgtgaagcaacatcgttttatgattaaggcgatttgtagctaacaaaaagaggtggcaaagccacctcctttttgctccgtttacatatgttctctactctttcataataagaaaagttatatcatgcatattacaattatgaccaatgaattgtatttctgaaacatataatcacctcgcatatatgatgagagcaaaaacgtgatttttcactttcctcttctattgagaaatgagttgtttttcatatcgcttgttcgcatcatcttctgtcaaacatgcagttgtgtaatgaataatattccggttatcatacgtaaacatatgttctaacttattttcttctgttaatactgtcggtaagtattttggtaaattgctaactactcctctattatcaccatctaatatccaatcaatttctttccattctaatagaccttcagccgtacgtaatggtgtattcatttgcattccatctggcaaatcagcaacgaacacatacattccttcactagcctggggctcatctttacctttaaaaccaacagtccctttatacgttacacttgaaagttctatgcccgtttcctcaaatgtttctctaattattccttcgtatggcgtttcattatcttctatttttcctccaacaccattccacatccccatattcggctttttatttctatttaatagcagtattttatcgctttttctaataaagcaaattgtgtatttgtacatacgatcatttcctttcattttccacatgagttatttggcttattttcaagtatcgacgagtctaaacataaatttttcatatcatttaatccaaaaggttttttaaagaaaataaagtgaaactttaataagtggggttttgctcctctcccacttattctattattttcatttttgaaaaaggataatatacaaattccaccttgccaattatgttatcttcttcaatatatcctaagccatttcgactatctctacttacttcgcggttatctcccattacaaataacttatttggcggaatttttgtcttttgaaagttataaaacacttgtgtgttgttaaataaatctttgtttgtatatggttcttcttgctttttatcgttcacatatacctttccgttcgttatgttaattacatcaccaggaagccctattacacgtttcacataatatttcgattcatccgcttcctttataatgacaatttctccgtgttgtaaattagaaagacgtactactgctttatttacaaatacgtagtcttcttcatataaagtcggctgcatcgattccccttccaccttacataaagtaaaagaatggtagcctatgactatcaccaatataaatagtatgtactttccccagcctctcttaatctcctttttcatatccattcccaccttataaagcgctttttaactcaaaaaatatatcactgcacaatatgtttccatgcagtgatactatttttactgtgccttgttcggttgttctactggaattgaatttgtatttgatctatttgtttttaattcaaaatacgcatccaaaatctctttaccaatcgcagaattaattcctgatttatcatcattcacccatggtacaacaactgaaaaagctacttccggatcagcatcatatggtgcataaccggcaagagttaaattataacatttttttcggttgttgttctcatctcttccaatatcactttctccaccatatactgtctcagctgttcctgtttttcccgctggtttatatggtagacctttaaacgttccggtacctgttccgtcagcttcttgaaaaactcttctaaatccttcttttacatgattaatgtacgaagtgtccatatccactctatttaatacaactggttcaatcgaccgaacgacttttcctacatcctctggtctattcggttgctctctaacttcttgtacaatttgtggcttcattcggtaaccgccatttgcaatggttgaaatatattgtgcaagctgaagcggcgtatatgtatcatactgtccaatcgcgtaatcaagtaaaaatccgggtatgttatcagttctacctacttgaccaattgattcatttggcaggtcaataccagtcgacacacctaggccaaattgtctaaaatagtagcgcattttattaaatgtttcttgtttaatatctaatggattgtttgggacataattaatgcctgccatttttaaagccgtattaaacatataaacgttcgatgacacttgcaaagctcttaaatcatcaatatccccaaattctttccacgatttcttcggcttagaacttcctttaaaatacattggtgcatcaaagaaatgtgtatacggcttaatcgcttctgtttgatatccagttaataaagtagcaccttttacagttgaccctaactcataagaacttgtcatcgttcctaatgcataatcttctatttgcataccgccatctttatttacaattttctttcctgccattgataaaatttgaccgtttttcggattcatcattactacgaacgcacgatccatcatcggctctgcagcatgaaaggctcgtaaattcttttcaagacttccctctactcttttctgtaaatccatatcgactgttaacatcaagttatttccactttttccttcagtcactttttctgtgcgaacaatcttccctgctttatccataatatttttagactgttctttcgttccgtgtagtgcatcttcgtattgtttttcgatgtaacttttaccaatacggtcgtttcgattataatcacgaactaaataataatctaattgttctcttggcaacccttcattttcattagaaacgctacctagtatagagcgcagtattttatcatttgggtattcacgttcccaatctactgttgtatctacccccggtaaacttgccaacctttcactaacgacagcatattcattttgacttacatcttttttaacgatttgcggcgtcattttatatcccgcattcattttgcttttaatggctagtacttctaggtcttcttttgaaagttcacttaattcttcttgtgtaattctttccctacgtaactcttcaacttttttatctaattctttcccttctatctcctgctttctaaatttactctcatcttctttcgttactttcgctgctgcccgcttttcatttaactgcatccaaaaatcctttttatctgtttctgttaacttgtctatgtcctcttgcgacatttcaattagcttagctaaacctcttgctacttgtaaaacttctttcgagtctactcctctcattttcgtatatgtaacggttcgcaatggtttattatttacaataacgtgaccttgccgatcaaacattttccctctaggaacgggagtgcttaccgttacatcttcctttttatttacttcatttctatacgtttctccatcaatgatttgtactttacctaattgaattataatagctgaaaataaaagaaagacaataaaaaatagtacatttaaccgaaatggaatatgagtctttttctttttcgatagttttttctgctcctttttctgtctcatttcgctccctcgcttcattctattaacatttctacgcaaagtcattatgtatcaaatttatttatatgatatatatagaattttatattaattataaaagaaataaaagatttaattttcagttttttatttttataccctatttattaccattcccttaatgcacaataaaatgaatattattctaaaagaaaaatggagcaaatttatttttataccattagtttacatttctttgtatactaaagaaataaattcataaaagacattacttaaggagagaacgaaaatgacagattcgtttatcatacatactaaaacgccacattgtttaaactttatgatctacattcaaaatatttatctcaatcaaaaaggaaaaaaagaaaattttcgttttccttacataacaaaaacattacatttctccactgactttaaaataaatttcaaagaattatggctgactcttcgtaagcaaactgctaacgacagatatgatttacaaatttttcatgaagaaaaccatatcttctatgagaagctttttaacacccaattatgtaatgaagactcttttaaagaattagtatgtagttttcaagtatggtggactagcatagtaggtcaactttcattagaacgttctgtagatgaatatgggcaacaactttttaacgatttagttttatacttaaagcaaaacgaaatagaacctttacaacagctacatattagcttactttatgacgattgtttattggttaaagaaaacatttcttcctattctgctattttgccgactaaaaccttttttataaattatagagatgtgattactacattatcgacctgttttcatgttgcttaatacagcgattacccaaataaaaaactgaggtagatacctcagttttttcgttaacttatttcattgaagataacccttcaacaaactcaccaatcttattttgaaaaacaaagtcaaagttatattcttgtcctgttaactcttcatttactaaaatagttgttgcccctacttctctctttgcgatttccgggaatgaagcgacaggttgtacttttaatgacgttcccataacgagaagtacatctgtttcatataaacgtttcatcgcattttgatattgaggcagtgtatctccgtataaaacaacgtctggatttaaaatgaaattacacttctcacagcgcggcacttcatgatcaatcatatactgtaaatcatatcccgctttacacttcggacaatgtgctgtttgaagtgttccatgtaaatcaatgacatgtttactgccacctaattgatgtaaaccgtcaatattttgcgttaaaatcgtaatatctttcccttgttcttctagctcagctaaaaaacgatgtccacgatttggtttatattgatggaacgtattaatttgaaagatttctttataatgcttccaaaattctttcggacttcggttatagtaccctcttgataaatacatctccacattcgcatcagcatacaatccatttgctgaacggaaatctgggataccactttccgtacttgcaccagcgcctgttaatactgtaattttcttcgctttttctaaaattaaacgtacttcttcaaattgttgcacaaaaatcacctctatgtattttcctattcttattataccagttgtttacaggaggtgttgtacaattcattttacttaatgcgttgcgcccccaatctctacaatatctacttcaactgtcatcgttacttcaattgccaattctattcccttactaatagtagaaagtgacatactcggttgccctggataattactcgcttgttctggtaaaaacggaatatgaatgaatccgccttttattttcttatcatgtttctctaattcatgcataagtccatagaataagtgattacaaacgaatgtgcctgccgtctgtgaaacagatgacggtatgccctcttcgcgaagtttttttacgattgctttcatcggaagtgtagaccaatacgcaatcgctccttcttctacaaccggtacatctactggctgattcccttcattatcagcaattcttgcatcatcaatattaattgcgacacgttctatcgtaatatctggtctgcccccagcttgtccgatacatatagtaatttccggccctagttcttctatatactcttttaatacgcttattgatttatgaaatacagttggtatttgtttgcttattatcttgtattctccaattgttttttcatgcaaaccttttgctacttcccaagctggattgatattttctccgccaaacggatcaaaccctgttaataatactgttttcatagttttatcctcctaattaaaaacgatatacaaggccgtacataataaacatatttatgataaaaattgaaagagcaattggtacttgcgctttaataaccgcatttttatcctttagctctaaaagcatcgcaggtacgatattaaagtttgctgccattggcgtaagcagtgttccgcaatatccagcaaacataccgagtgctgccataattgctgggtttccgccgtgcatttgaactattaaaggtaagccaattccgccagtaataacagcaaacgctgcgaatgcatttcccattacgactgtaaatagcatcatgcctaaacagtacgccataacagcaacgaacggatactctgtcggtaacacttgtccgactaaatcagaaacgacttgtccaacgcccgacttcgcgaaaataccgccaagtgccgctaacatttgtggtaaaataacagcccagccgacagcttgtaatagtctgcttccttcttgaacaggcgttgttattttcgattttgtaatacgcatcgccgcgacaaatgcgagtaatgcaccaagcgctaatgcaactaaagttactttatctggatcaacaagagagacatttccccatttaattttccctaacgtcaacgtaccgataattgtaaaaataggaattaatagtgcaggcataaaaattttattttttaatttctcagcatgttttacacgttcttgtactggaacttctttttcctctgattttgtcactttatttagcgaggctaaaacgaccatagcgagcacgatacagccaacgtaaaacgaaggaattacatttccaaataaaaatgtaactgcaaacaatgcccaaaataaactagaaccgaatctgtttggatgttcacgatcgaatgcgatacgaacagcgataaaagcaacaattatccctaatacataatagattgtatccattgtgatgatgttcatattagattgcctccttctcttcttttccttctgccttcattgttttctctatatatttatcaaaccttctaaatctaatccagcttacaataagtgcagatattgctgtcggaatgccccaaagtgccatatcccatacaccgacatgcatacctactgaatcgaagaatcctttcattaataaaatagcaccagttgcgatgaaaatatcttctccgaaaaaccaagctgtattttccgcagcagctgcgtttgctttaatcttttctcttaatttttcaggaagtttaccgtatttaccttgcgcagccccttctgccatcggtgcaacgagcggccttactgtttgcgcatgcccaccaatattaagccctagtgctgctgatgattctcttatcgtaaaatatgacattaatactcttccagttgttgctccttttgatttcgttataagtgcttcggctctttcttttaaaccgtaacgctctaaaattccgattaccggtaaagttaatataattggcatagacatatatctattttctatgaaaaatttaccgaacatgctgatcacatcataaaaacttaatcctgaaaccataccagtaacaatacctgcaaccataactactaaaagtgtatttaatctaaataaaaagcccactgccactaataatatcccgattaatttcaccaattccaacacttcccctcattttttatttcggtgcacatatagaaataccatcatgtccgaatgttctgtatattctttctgcaaattgcactgctttttccccatcaccgtgtaaacaaatcgtttgcgcctgaactgctactttctctccattgatcgaatttacatggccttctttcaccatttgaagtacttgctttatcgcttcgtcttcatcttttataagcgcattttcttctgtacggctcgttaatgtaccatcttgcttatacgtacgatccgcaaaagcctcttgtacgagagttacattgtatttttctgcagcctgtataaacgcctcgctatttgctaatccgtaaagtaatagacttggatttatatgataaattgcctttgcgattgcatctgcaatttccggattagacgccgccatattatataaggcaccgtgcggctttacatgatgcatcttcccgccagccacttttacaaacccgtctaatgcgccgatttgatataaaacataatcgtatacttcacttgctgaaacattcatgtttcttctaccaaatccaattaaatcaggaaatccaggatgcgcccctattgctacgttatactccaaagctttttcaacagtttgacgcataatagacggatcacccgcatgaaaaccgcaagcaacgtttatagaggaaacgaacggaagaatttcatcatcattccccattttataaactccaaaactttctcctaaatcacagtttaaatcgattgtagtcacaatgtattcctcctaattccagcttcgtaaagcgatgaatttctttaatagattcatatttacttcttgttctatgtacaattgttccgcttcttcaagcgtaattttctcaaaagaaacatagtcccccggctttagctgggcaagaagaggtaaatctactgaaatgatatctcccattctcggatagccacctgtcgtttgcctatctgccattaatataatcggctgtccgccattaggaacttgaatggttccaaatgtaacaggactcgataaaatctctttttcttgaatcctatttaaaacttctccctcaaccctatagcccatacggtcagcataattagataccttatactctttcgtaaaaaatgcctttctactttcttctgtaaattgatcgtattcaaagtcagctatgacacgaagcttaggatgtttcttatactttggtagtacgctgttgctaattacccatttcgtttttattcgctcatctttttgtaagtcttgaatgaaacgattcgccatttctgagtacgtaccaatttgaaaacaatctccttttttcagcattcttccttctataccaccaatcgcagcacgtatgtacgtacttttgcttcccattgtacgctcaatatgtataccacccgcaaaagtcacatacgctctacaaccacttttcacttttccaaaacaaagcatactaccttcttccgctaaaatgggacgccataatgggatacgttctccatttaacaacggttccatgtctgctccgccaatcgcaagtaaagtcgttttctttattaacaatttaggtcccataatcgtcatttcgagtcccgcttcattctcttcattaccaactaacatattgatcatccgaagtgcactttgatccatcgccccgccaactggcacaccgtattgttgataatgagatcgccctaaatcttggactgttgtaaacattcccgcatgcaaaacttctacatccattctttaaccccctcaagtgatacgtactcttccttcgttattggaataaatcgtaaatacataccactttgaatatatgttggtatttcttcttccggattaaataatgaaataggagttcggccgataatattccatcctcccggtgtttcaagcggatatatacctgtttgatttcccccaatacctactgaaccaggagagatttgtaaccgtggtgtttcttttctaggtgttcctaattcttttgataatcctcctaaatacgggaaccctggtgtaaaaccaagcatatatacaaaatatgtagtttcactatgtattcgaatcacatcttctacttgtaaaccgtgataatgcgcgacctcttctaaatcaggtccatattcttccccgtagcacactggtatagaaatatgtttcacatcctgttttacttcttctttataagaatcacacagttcctttatatactggcgaacgtaatcatatgacctttcacttctctcatttctcttccatacttcgtatacattgtagtaaacagctaatgaagtaaacgatggaacacactcaatcattcctgcaaacggatgttgctgcagtgcttgaaataaccgctgtactttctcatatatatccatcttaatttcttcaccaaatgtaacaataattgcttgatcccctaacgcagaaaatttcatcctactccctctttctatgccaaaaagccgagttctttcgaaatgcgatgcgctgtttctttcaccttcgcaataaaatatgaaatgttactttcgctgtactcaattgctaatcctgaaatactaatgcctgctacaaccgttccatcgctcgcgaaaatgggtgctgctatcgcggctgtatgattttctaactcagaataactaattgtgtagccttccttttttgccatttgcaacacttctaacaattgttccttatccacgattgttccatctgcaaactgttttaaatccacttcctctatgtatctccgtttctcttcctcagagaaatacgatagtaaaattcttggacatgcaccagcataaagcggtgctcttcttccaactgccgtatacacgcgtactggctgaacaccttccatcttttcaacataaattgcgtcattaccatcttgaattattaaattaactgcctgtcctaaactatctctaagttctttcatataaggaattgctatatttcttactgataatcggtgtgaaacaagttgaccgaaccgtaaaaatacgacccctaaacgatatttccccttttcgtttttttgtaaaaacgccatctcttctaacgagccaattaaacgataaacagatgttttcggcatatttgtaagctgaaccatctcagttaaacttagctcttcatgctcataaaacaactctaaaatatccattgtcttaactgccgttttatttatactcattctatctccctttcgttccgaaaaacggaacttaaattccgtttttcgaaacaaacatataatttaaaattataaaatattctttcaattcaatcaatagattttaagcaaataaaaaagcatggaagaatatctctcccatacttcactacactttataacgctcttacttgtttcaacggccagaaaacagcttgtccttttccaacaatttcatcttctgaaataaagccaaacatgcgaccatccttagaaacttcacgattatcccctaaaacaaatacttggccttctggcactttcgttttccctgtgatttgttctaacgtaaagtctggagttaatacacggcctactgctttttctttaaactgttttaaatatggttcttccatcgcttttccgtttacatataaaacatcatttttatactcaactgtatcgcctggcaaaccaattactcgttttactaaatcgtaaccttcttttccgtggaagacgataatatcaaagcgatctaatccacttatactataaccaatcttattcacgagaactcgttcgttattttctaaagtgggcatcatcgattcaccttgtactaaagaaggtgtaaataaaacaccgcgaataatagcaattaatacaagggtaaaccctatcgttttagcccatgagaataattctttcttcgtattttccttcatcgtttctcctctttcttaagcacttattttattatttcaactaattcttgtactaaattaggatctatttcagaaaaacatgattttccttctcttaccgctgtaccgacgtgcgcctgcgtaattccagtttcatctagcaatcgctttatattttctttcgtcacgccagctccagctacaagctgaatttgaccatcgcttaccttttgcatttctgtaagcaccggaatattctctactatatttccttgtccacctgaagttaaaacgtgagtcactttatgaaacttctttaaagttctcatcgcttctactggattttctatatcatctatcgcacggtggtacgttacatttattccatctacaacagatagtaagtccgctaatttctcttcatccacttcatttcgttcatttaatacgcctaatactacaccagctgctcctaacttctgtgcaactataatatcttctttcatcatttcaatttcttcttccgtatatgtaaaagacttcgcatgcggacgaatcataacatgaattggtatacttaccgcttctaccgctttttttataaaagcataactcggtgttaaaccaccttctgtataagatgaaattaattcaatccgcttcccgccagcgctttcaattcgttttacatcttctaaacatgttgcaataacctctagcatgagatgacctcttttcgtgcttttttcttattataacattagtaaaaataagaagcctagctttctcctttaaaacttaaaaaagaagaatgaaaagaaagatttttttattggcaacaattattggtaacatcctattattcatgtacactcctaccataatgaaaaaacccgtcattttgacggacttttctaatttcaagctttcctttcctcagttttcatatcaatgcctaattgatcttccaataactttacacctttctttgtaagatggacagcccgattcttatccgtttttgtaatccattcctgttcaaaaaatagttttgctattgcagatcctaaccaaccggcaatatggtagcgtcgttcactccaatcaaggcaaggttttgcaaataccctcctttttgtatctgcctcatcaacatttatttcaaaattcagaaaccattgcttaccttgttccgttacaatgtattctccatcctctaaaattataaattgcctatctagtaatttttcagttatctctacaccgagtttgcctgcaagatgatcataacaagttcgagcataacgaatttgttttagttgacctgattgttttaaagaacgaacttgaactgttggtgcgattgtccctaacttttcaagcacttctgcaacttcttgattagcaagtcgatagtaacgatgtctaccatgttgttcaactgtaagtaaattcccttctactaatttagaaagatgcgaactaattgttggatgtgacacttttgccatataagccaattcactagcaggtagtgcctgattattcattagacaatctaatatgattgctcttgtaggttcagcaattagtttagctatatatgagatattcggatatacattcatatttcgatgataccctaactattaaattgatacaattattttaagtttaatagtaaaggagaatgtattatgaatgcaattgatcttagtatattaaatttgaaagaaacgagaaggcgctcagaaaaattatggaattctcttcctaataattttcttaattggaagcctgatcctgaggctatgtcttttggtgagatgattcgtcatgtatggagttcaactttttactaccatatgattataaaaaacaacggttcaataaacgacatacgtatcccgtatgatgacgagccgattacttgtgtaaaaaaagaaattgaattggcacaatcatactttactgacttcatagaatatgttcaatcaataagcatagccgatctagattcaagacttattgatagaagcgatgttggctatcaacgatatttaggcgatatgctattacgaattgcctatcatgatgcggtccatgcaggtcaatttttacaatatttacgaatggtaaacttagaaagaccattaatttgggattaaatacgaaaaatgtttatacagcctccaaactggcattacaataagaatttttcaacaagaaacaatcacaaaaccatgataatcatttatattaaaaacctacatctcaactaagtacttcatacacataaaaagcacgggtttgattactaatcaaacccgtgctttcaaaacaactataatatccataaacaataaaatgtaaaatttaaaaactacgaccgaaacgccgcatccgccagcatagacaatgttgcatcatccatcggtggattatgcagtcctgctctgacgtttaaatagtaacgatggagcggatttttttctgataaactttttgctcctacgatgcgcatcgatttatccactatagatatcgccgcatttgttacagcatatttcacggctgctaattctgcttgcagtgatagtttatcttctgcctcatcgtactttttcgcaatttgatataaaaagacgcgagcttgcataagctcgagttctaattctccaactaatcttctaacattcggcaataaactaatagaatggtttaaactgtttggcttgtatgattccgcaaattgaactgcataatttcttgctgattgtgcaattcctaaataacatgctggtatatgtagcaaccagccaacacccttttgttttactttcccgccttttatatctgtaaaaaagcgactttctatctctacattttgtaagacaaggtcgtggctagcagtccctcgcattgcaacgctatcccacgtttcttcaatagatacaccgggtgtatttcttggaataacaaactcaccaacttcttcttggccttccatacttgctgaaataataaaataatcaagtactggtgccatcgttgtaaaagtttttcttccatttataacccacttctcgccttgttgaaccgctattgtttctggtttgccgccacgcgtcggactccctgttttcggttctgtcgctgccctgttaaagagcgcaccattacgtacttcttcgcaaaaccatttgaacatctcatcattccaagagcgattttccgctagctctttcacaatgccaagatgccagccaatcgataatgcagtagctccgcagccttccgcgattttctcttgaaataaaacaaagtcatataaagaaatcgcactaccaccaaattccttcggtaacgttaatttcgtatatccgatatctttcaaatcatttatattttcatacggaaatgatcccaattcacttagctgatgctccctttccatgaacttcggaatcaatttatttatttgtgcaataatgaaagattgttcttctgtttcaacaaatgagagtgccatactataatctcctttatgttcgattcatcaaccgctcactttttcattatgattatatgaagctacctctctattgtttcactattccgataaaaatacaatgtttttgactaataagaaaagttcctatttaaggataggttcttttcttatgttaatctcctttcaatgcctttaatggcaaagaggttacatatccaatatacgagaataattctttaaagaagaatggaatttctgtgtctaacgttttatatgctgatgtcggcgttggtgaagcatacgcttcaatattaatatgttttgcaattctcattgcgcgtttcatatgaagtggatcacttacaatcgtgtatgtgcgtattccgttctctattccaacttgcttcgcattttttaaattttcttcagtgaaaagggatttagtttcaattaaaatatcttcctcttttacaccttgtttcattgcatatactcttgcagtacgtgcttcctcaagttctgcctcgaactttgtaccacctgtaaaaataatctttttgatatttccattcttatataaagaaatcgcatgattaattctttctttaaatacaggagatggttttccgttccacgaagctgctcctagtacgataccagcatccgttttcacgtcatcatttgctttaaaacgataactccaaatatcgtaagctgcataacttacatataaaatagcagaacaaatcattagtaaaaatacttgaaagattcgtcttttcttactcttcttattttctttcatttgtaattgcctccgtacatcatccatacttctataaaaaacatttatatcaaatcgttttgtttgagtttatttaaaagaaggaactttacttgttatttatgtataaaagggttttcatttaaaattgaggattatcaattcattttcatttgcggttttcattacattttttaaattcataagtttattaccatacaactacattgtaacgaattttttctcagaagggaacgatgaaacaaaaggaattaaaataaagtagcattttgtaagaaaaaaggtatatttttcatgtctcacgaacaatatacctttcaaaacacgaattataacttttctttatataactctaatttttctaacaattgttcttttacgcctggccattcactcgagataatactgtacaccaccgcatctctcacataaccattcggtaattttctttcatttctaagcacaccttcttttactgcgcctaatctttcaattgctcgttgtgctttttcatttcttgcatccgtcttaatttgcactctcagcatatgcaatttttcaaaagcatactggagaagcatatacttacactctgtatttatactcgtacgttgtacactcggatgataccacgtttgccctaactcaactgtcttatcttctactgaaatattatataaacgtgtacttcctacaatcttattcgactgttgatctacgactatgaaaggtatttgagtacctcttccgtaaccctttatcgctttttgaacgtattgttgcatatcttgcacactatccattttagagattaaatacgcccaaatatcccgatttccttctacaatcgaaaacaaagtttcgacatcagtattatccattaaccgcaactttgctctttcgtgaataatttccatttttaagccccctttgttgttactatatcataagaataaaaacgtattataataatataaaaatataaagcaaagaattcttttcaaatatattcttctcgtataaggaaggtaggaagactcatcagtaacccttaaaaaagaattttttggtaattcccaataaattctatataatgataaacgggaggggataaaaaatgctagatcaaattacttggggaacgccaggcagcttattatgcttagggttcttttttgcgggactaggaatcttcttaagaagcgttacgtcatatacgaaaaataaataagaatatcctgcttttaaacaaaagaagccctctttttacagacggcttcttttttataactttatcttattaaaactttaaagcaataaataagcaatcggcgtaataataagtaacgttaaaatcgttctctgcacatataaaataataagttcagatacttttaacggaatatctgttgataatatacaaggaatggaagcggagaaaaacaaaatagatgatacggaaacaactgcaataacaaactttgtcacaattggtgcacttactactaataatgacggtaaaaacatttctgcaataccaactgatgcggctttagcggctaagtctgcttctggtaattgtaatagccatgtaaacggatagaaaatataactgatccaatcaaatattggcgtaaacttcgctaagacgataccaattaatcctactgacataatggatggtaaaattcccatcgtcataataaatccgtcttttaaatttaatgcaatatttttcataatgctcggtgcagactttgatacttctaacgcatcttcccaagcacgttctaacattttttctttataaacaggctctgggaacccttcttctgttacatatgtatctggttttctactgaggggcgggattcttacggtgatagcagtcacgatgaatgttacaacaagcgtagtccaaaaataaacattccataaatgcataatatctaatgtttttgcgatgatgatcataaatgtagcggatactgtagaaaatcctgtagcgataatcgccgcttcttttgtcgtatactttccttctttatacacgcgattcgtaataaggagagcaagcgaataacttccaacgaaggacgcaactgcgtcgattgccgatctccccggcgtattccataatggcctcataatcggacgacaaaatgtaccgataaattcaagcaatccatatccgactaataacgctaaaaacgccgagccaattggaacgagcaaacttactgatatgactagcttctcatacaaaaacggtccaacatctggcgcaaagaaccaagctggtcctacttttaaacaatataatatgccaaatacaacgccaactacttttaaaatagaaaaacaaatgtctacgatagatgcattccatttcttcgtataaaatggataaatcgcaccaattgccataacaaataatgcataataaggtactatgccaggaaccgaagccctaatccacgatacgatatgatcaatcataatagacgatgcaccgtttatcgtaacaggaacgaaaaacataaacactccaacgagactagcaagtataaaccgaagaataattcccttctcttgccctgtcttaattacattactctttaattcaatttcactcaaaattcgacacctcctattatctaaatattctgtataattatgttggattccttctttccatttctactatttcatcatataaaaaaagcctattttaaaataggctttttctactacctctcataatcatccacaatcacttgaatgatacgatacgattcttctgctactttttcattactatccctattcgcatcatatgtaattaacgccttccaaagtgcccatcctctcgctctattccacgtttcttcatccatgcgtaatacttcattaaatacatttctactattttcatcaaaaaacgtccacgccatcgctgcatcacaagccggatcccctactcctaaaataccaaaatcaattacggcacaaagctttccgtccttaacaagtaagtttccaggtgcaacatccccatgaacccaaactggcttacggtcccatgttgaactaagtgctacattccaaaggtgctttaataatgcctcgtcaaaaacatccttattattttcaatagcaactctcgcctcttcagcatatacagatataagcccgcctcggtaaaaattatgcgctccagctattgggccattactcgcatcaatagcctgcaattccactaaaaatgatcctaagtccgccgcaaattcatttaggtcacggacattttgtttcgtaatagtatctccttctatccacttattaatagaccaaggccatggatactcttcagatggatttcctttcgcaattggtgcagaaatcggtaaagaaagctccttacttaatataggtagccacttattttctttctctacttgcggcgcatatgccgcgtcacttggcaatcttacactcatctcatcccctagatgaaacgttctattatcatgcccactaaactttacaggcttcacttctaaatgtgcccatttaggaaattgttcccctatcaatcttttaactaaatcagtatgaatttgattcattcacttgccccttctcttttgaaatttactaagtccatctgtactcccaacatactcaaaaccacttcttttataaaaatcattcagcgtacgattatgtccaacgcaatctaacttcaaatactctttatcacattgtacattctcgtctatccactgtaaaaccctctctcctattccattccccttatattttcgtttcaccgcaaatctatgaatatataatgaattagaaacttcctctttaccaaaaatgtattcatcccattcattttgtttaggagaaactgtaatcgtaccaactatttcatcttctttcataacaacatacgtatatttctctcttatacattctagtatttcagccgtagcttcctctcctaaaagatactgccactgatccacttctttatattgtagccattgtgctacttcttttaataaaatgataatactatcactttcattttcagtagcaattcgaattgcatattctttacttatattgctctccatattgcctttcccctttcaaattgctaccatactgacaaacgagtccttccatcattttcatctgtaatatattctacataaaatccttgattccgtgcgttttcatacatcaattcaatcgctttttgatctttcgcataaatttgtatgcattgagcatccactgctaatacgattagctcacacttactttccttaaactcttcatatgtttcaatatctatcgttttttctcctttaggatatgcttttaaatctgcaaaaataagataatatatgttgtctttaactaactttttcaatgctaacccttccactacacttggttcttctggaaataatgcctcatccaattcaccacgtgctattaagtaggactcctcatccctcactcgccaatcaaattcagtaatatcaattgggtttaacactttccaaagtacattgctgtattcatttggaatatctacaaaaatccctcttttcatatgcttgctcctaacttattcattttcatacattatatatgaaatgtaattactatattttgtcgatacatatgtacatcataaaaaaccgctccactattagcgaaacggtttcctttttcttacatttaaatatttcattcaattgttgcactgccttttaaaataatttctaatatatgcaccacattagccgttcattcttaatgctcacttcgactttacaaaataatataaaaaccatactgcatgattttgttcatccgcagctattctccgtaacaactctttcaaatgtacatcggatgtctcatctgaaatttccaaataaaaatctactgttttttgttcatcttgtatagcgaactctaatccttgtaaatacgtatttgggcagtcttcagtaatttgtggtttcggctgcctgccagttaagttcgtataaatttgtacaaagttgtggaaatgctttatttcatcattacgaatttcaagaatttgtttttgttctacttgatttggagccatattcgctaattttgcatagcagcttatggcgctatactctccatttatagctttttcaatatcactaatcaacttatcattttgcctataacaatcataataatttgaattatacatcgtatccccccatactttcgcttaccattttatgcatttagaaatagtaggagcctgtgtatttaacgggacggctttagaatgaaagaaaagtttgagaaaagggtctattttgcaaaggaattgcttatgcataaaataatactattgtatactgttgctataaactctcgcgggagttaggaaaataaattcgcgaatcaacgattggttcaacatgatgcggtgcgaagctattatgagttaagtgacataattaggaggttccactatgccatctttatttaaaactatggagttccagctaaaaaccgaacgacttgacctgagtatgtgggaggaatccgattcagtttggatgaggaaattaattggcgaacgtggtgtggacatgccgaccctcgactccgttcgtaaccggcttattgagatgcgtaagaaggcagatgaaaatggcatttcccttctcactattcgaagaagagacgaaggcgatttcatcggatactgcggcttgattatcggtcgttccacacttgaagagccggagattgcatacgagttgttccgcagcgctcatggtaaaggttatgcgactgaggcggcatctgttgtactggacgcggcgattgctactgggcgccaaagactttggtcgactgtaggtgcttggaatatcgcttccctccgggtactagaaaagataggatttaagcgtcatcacagtacgtgggatgacgaacgtggtgagattgtctggaatgtacgtgacctttagaaatcccgacttaattctaaacataacacttttcaacaattaggtgtttacattgaggaaaagccagaaaaattaacaaactttattatcagcaaatattcattcttcagcttatagatttcatcaaaaaaagccgtttcactaattatgaagtgacccccgaaagttagacaggtcgtttcattaggcagcctctagggtatggaaataaaaaccagtctatgacccatttttacacgtatctcggctgaacccctacataaaatggatcttgtgtctcaggcttttctgtttcaggtttagtctcaggtttagtctcaggcttcgtctcaggtttagtctcaggtttagtctcaggtttagtctcaggtttagtctcaggtttagtctcaggcttcgtctcaggcttcgtctcaggtttagtctcaggcttcactttgtcttcgctagatggcttgccaagatcttcgggcttcgctttgtcttcgctagatggtttgctaagatcttcgggcttcgctttgtcttcgctagatggtttgctaagattttcaggcttcactttgtcctcgctagatggtttaccaagactttcaggcttcgctttgtcttcgctaaatttttcgccaagatcatcaagtttccctttgtcttcgctaaatggtttgccaagaccttcgggcttcgtcagactcgctaacttttcgacaatgttattggtagaaggttgttcttttgtaggttctaaggaaacaattaatttatttgatggttcagtgttattatggttgattgtttcaagagaaggttctacaggttctataacatctacagttttttcttctttcactattacatcagaatgaggttcttcttgtttagttttatctgtttctttttcattacgatccctttttttgtacttctctacatttttttgatttgaatcttttgcttgttcatcattattttgagtcattacgactgctgttgttacaccgccaccaacaactacagcactaattgcaccaattacagcttttttacctatcaaaatttttgtgaataatttactcatttttactaacccctttttaattgtatttttataatatagtaaataattgcttataggtatataataaaccatatgtgttttaaaatcaacaaatatttaaactaaatatggtttattttgttgttgtaaatctagtgtagaagttaatattaaattaaaatacgcaatataacaatattaggttattagctaaaccaaatgtagtttatttttaaaggtttattaagtataatgaatataaaggaaggagattatatgcatgagtaatgaacagaatcagataagtcacaagaaagatagaaaaaatagcactaaaagtatagatcagcgattagaaaaattagaaatgacattaaaattacttgatatatcttttgatgaattagtaggccttgttacgtattatcgtgctgaaaagcaaaagagtgatgaacctatggaacgatcaggacaactaaaatggaatctagataaattaatgttagaaatgaatttaaacatagatcaagtagctactattgtaggtctacatagaaaccaaatagggaaaataaaaaatcatgattttaaacgtacagatctaaaaacaatagaacgaatttctaaaggattaaatgtatcattagatgaattatttagatatgaaaaagatgattcagtctaaaaagaaggtaactcatttgtaggagttaccttctttttttatgtgttttattaaaaatggtgttttcatcaataattaagtttatttttgatgttttttaatatgtattcattcaggattctcaaattagtttctataggcattttgtttgattgatacctattgtattatggatgcctacaaaaattgatacaagttaatctgaagtgtcattttttcgttaagtatattatattttgctggaataagaaaaaaagttatgaatttataaatagatgaatattttattgttttttaggttttttctttaatggtaagccataatgtttagcatttttaattatttttttagctagatctttagcttccgttttcgacatattcatacagttttcctctcccctactgttttattatttgtatgtccaataagtaggggacttaaacataattctgaaaattaggacatatattatattattccttaggacagtaagacactgtacaaattcttaaattacaaatttgaaaggagaatcgaaatgattgagcaagagaggaaggtaagaaaagataaaaaagtagatattaagccgacaatttcagtagatctcaaagaatgtatttacagactttcatatattacaaataaacctgttaaagatgttgccttacatatttgtgactatgctctccattcaaaagaaattatggagatattatcggaaagttttcgtagaaacttaacgatacacaatactctgtatatgggtgatttgaatagaacatcattagcaaaggtaaaaaagaaggaagattacccaaaagagagaatttctttacgtgtttcaaaaacaacttatgaaaacatttgtaaattgaactatgctctagatgttacaccaactatggcaactgctattttattagaaacatgccttctatattcagattatgtcaatgaaaacgctagatcttatcttgaacaaaacttggatcttaaacgtataaaagaattagaaaaggtaataaaatatgtaaatgaacataatccatatgaagaagaagtatcgtggggggctttattatcatttttaatggatgaaattaaaacaggaacgactaatgttgctcaattaataaatgattggttagattcatataaaaaattgaaatgacaataatcccttaatgattatttggttttcttatttatttataaattagtggtacgtgaaattttatatattatgaagataagtcctaaaaaataagcattgaatctgattcaatgcttatttttgtagttaaagtgataaaatcttttaaggctttattactttaactagttgttctccttctataatcttgaatttattgtctaattcacttgtctcttcaattactctgacactcttttcgattactttgacattccttatatttaattcttcaataatcttttgatattctttatactcattttctttcattacgataattggttgatttcttgctacaatcttgaattcgttacttaattcatctgtctctttaatctcaaacgatatatcttccagcctattaataaccgaaattagatctttccatctttgttttcttacttcaaaattaattattgtaggagaaagccacataggaacatcaatttctatattattttttttatagacttgtaggaagcaatcctcatgatcctttcgaatgacttgtacttctaatctatattcaccaatttcacaaaagaataccacttcattattttgatgagttgtatcttttaaattaataatatcttctttaaaaaattcatctgtctttaagtccattacacttttcctccctttattgttttaaaggtacaaatgacttaatacaaacgctttattactgatatataaattgaacatgtaatacagaaacagtattttgttttgtttcagcattccagtaaacattaattccgaaataagttccaccataatctttttggatcattttatcaataactttataatcattagaagatgtattgaatttttgaatgtttactgattctacagcaacttttgttcctttaggtaaaaatgaagggatttttgcatcttcccaaggttctaatgttccagctttcacctttgcatcttcctctgtgatcttaccgcttgcaatatcttgattcaagctatcaaagtatgatttctttactcctgtatagctaccgtaatttccaagcttttgacgtaatgcactattttctgaagactcttttggaggtgcaacataatatggtgaattcacttcatcattgttatttccattgttattttcattattgtttccgttattgtttccattattgtttccgttattgtttccgttgttgttttcattattgtttccgttgtgatccggctgttttttcatagtattgtataaaaattgtacgtattgttcacgtttcacaagtgtttttggctcgaatgtgttatttcccatccctattgaaataccatttgattgcaccgcactaattgaatctgtagcccaataatttttttctacatcatcaaaagtagtcatagattttggttttaatttaaatgctttcgtcaaaacagatgctaattgttcacgagttaagatgttttctgcgccaaaagtaccatttccgtacccattcataatacctgctttttctaaagctttaatttctttttcaaacatatgacctctaatatcagaaaatgaacttctaaagcttccgtctacatctgctggttttaaaaagttatataacattctagcaacttgaccacgtgttacattatcaccaaaaccaaagatgccatttccataaccaagaaaaatttgtttacttcctaaatcatttatagcttccgtagaccaatgatttgctggtacatctttaaatactggtgtttctgcactagataaacttgcaccaaagaacatactacccataattgaaaatgctgtcgttgtttttaataatttgtgtttcattataaattcctccatttattataaaattagaccatttgtatattatagcaaattgatataaatgttttatccctatagtcaagattctctccgaaaaatacaagtccctcatattctaagttctctagataattggctacatagggatatataagcggttttcccgaaagataacgttttgcgttacttcctttatgttctattaagaattcacataattgtctggtactaataatttcatgttgttgtataaaagatttaataaaacttttttctgattctgataagaaattatgtaatactttattataaattggcttagtgttaaatccctgctcgatccctagtgtcattacttcatcgaataaagaaatttgattaggttctgtattgttaaattcaacagattgaagatttatttcatgcttagtatgttcaaacaagattcctattaatttatttacttgcttatctaataagggtaatttgagttctagatgttcctttatatcccttggaatctcaatatttaatggaagttgaattccttcattattttctaatgaccaattgtttctaagttttattaatatttcatctaactcataatctatcttagtcattccctctataacttgtttaactatttcggctggaatattagtatgttcttcaaagtgacttttaccgaattttaaaattttatttgtctttaaattttttacaatgtattggtaacgtaaagagcgtccacattcacattttagtgtctctgtaacaacacctgcatctatataatcaactaaacgccaatttgttgaaatgtgcttgtagtcttcctctgatccttctcctttttgttgtgccaatatactagcaaaagcggttttctttcctctttttaaaaaattcgtcaaatattcttgttgtacatttgataattctttaaatagaatatctctctccgtctgcgttaaatatttagctaccatatttcacacctcttttatacagccattattttaatcataaggtctatatttcaagcgtaactttttatactctaattctttttctaaaatataagagcgcataaacaaacacacactcccgacttttttcaagggttttagcttaccttcacgaattaatctatttactctatctcttccaatatccaaaatttcggctacttcagaagtagtgagaacttcatctttaataaagttctccatttcttctttagaactaaatttccaattcatccgtatcccttcctaagaaaaaatttattgttcttaataccatatataaactaatcatagaaattactactaaatcaaatttatctactttgccaagatccattgttgcaagatagaggatactagtaagaagtatcccactatctgttttattaatttttaatgtattgatgttcttcattttaaaattaggtgattagtgtgttataatatttctgtggggaactggctgtcaaccttccccacagataaatggttatcggtgcttgcgttctttacgctggcactttttttgttttgtagtctttttcttagctttttttctagctttagcttttgcctttattttggtatgtatatctaaacttacattgataatccccaaaaagctggcaataaagactacaacttttgttgctatttcaatcacctatctccacctccttgattctattataccatacctgacctaaaaaaagtataggtttaagcaaaataaattcaaaaatataaataaaaagatattgttttttcgttgtctttaaaggggttttatgctttttggtagaggctggctcgtggtgtgcggacgaaaccgcacgatcttagcgtatgaacatatagagtagagaataattaaggatcggaagtgattagcggttcggcatactaaaatagtttgcacaagctgatagaaaaccttagtaactttttggtcttcagcttggcaaaagccaaaaagtatgccgaatttctttcgtcaagaatgtgaacagcgtgaacaaaggtggagatttttgagtgttctttactcaaaaatactacctgtttcttgatgaaaggaaagccctttgatgtatacagtatcttttcctacaaaaaaaacgaaagatttatctctttcgttttttgtatataaagaaaatgagagtagttgttacttaatttgactttctatttctaatttcatttttttccattacactacatagttttgctaaaccataaaacaaacctattacacaaaaaagtattaaaaaaggtgtaaatttttctacagcaaaatcccgcatgatttcttgggcttgctcgggttttgttatgatattatgcctgaatgtcaatatatctatattcatttttacagtagctacacaaacaagtacaatgggacataagatagctattgccatcattaaattgttcaacaaaaattttaaaagctttttcattatgatcctccttgtaatttatattttgtttttataatacactcttttatttttatttatatactttttatattgttgtgtactttttactagataataaattgaaaagagaagaagtcccataaaaggaatgatgctagaaagaataattctagcaataagagagtctagatccgctagatacatataaatgaaacttccttgtatgaggataattgaaagagagattataattatatgtatgtatccagtcctttctttttttaattcatctagttgtctataatattttcgattactaattttcggtttcatatgtaccctccataaagaaaatacgaaagcatttgaatagcaagtaggcatttgcctacttgcttttttatgttttttcttttccggtgcgtccagcatgtgccttggcaaactcaggaggaacttacagagagtagcgtgagcgtactctctgtagttatccctgtgtttaatgctgtgagcgacacatatctccttgttagcttctgaaacgcctgtacaggctttcaggaggttataaggagtaagtgccaccgcccaaaggatctaatgtttaaatctttaaaattgaattaaattctacagaataactcttttattcaatcctcatgcttcactttattttccatccatcttgctaactcgcttagttgaatatcctctcttttaatatctgtttctgcaatatacggttcgacaacacaattattcaatttactatttaaattaatgtcaagaggattaattgtagaggttttattttctagatttaaatttattattttgccaccaaatttttcaattattttattataatcagtcataagtttatccattgttcctccccatttcttaataaaatttaaatttgattaaaccctactatctaattcagtaggcttcaaaaatcagcgcaaaaaacataaccataaaaatcaaaaatatcaaaaaatagacacatgaaattctcatatcatctttattcatattatctgcgcccccttctttgtgaagaatttcgaagcctatttatcttttcttttttttcagatttgtgattagttgaaccgaataataaaaaacgcaaaaggaaaaacattgcgcctaaacctaacaagctacaaaaaacattccaagaactaagatccaccatcatattattttccgcctttttttctataacattcaaatttgattaaaactctgcaaagattcttctatttattgttcattttcaataatgtaatatccttggctagaaattgattttatacgctttaaatcatcaattatccttgcatttaattctactatggttctacttcccccatttcgtccatcgagatcatccaattcccatagcaaacttttctcaccatcaaaacccttaaattctgggttaattccttcttttaaaacttttatggcatcttcacaagcatgaactagatcttcaggagaaactaattctaatttctttgagtttggaggttcaaattgactatatatcggaatatgtattccataatttgcgtatacagctcttaatgtcccacttgttgcgtaagtaaatcttaattcgccttgatcaaaatatcgtatcatctcattaaaatcattttcttcatgttctacgatttcaaattgtttgaaataagtccaagttactcccataaattattcctccctacgttttatacaaaattcaattgtccttttcaatcattctctctatctcctagcttaaaatagatttaatctacgtatttaaacgcaactggggaagctgttaattcaagataaggaagctcattcgcttttgcttgtctacaaaactctttaagaagtgtcattccttcttcgatacttaatattttgtagaaattactgtttatatcatcaataaagaattcaattatttcaacactatcaaataaagagttcgagtctatttctgtaattaacttctcattgtctatatcaatttttacagacaaataattcgttacaccatcaagagcatcctcttcaaatttatgagtattaaatttaattgtcgcatcaaaagaataatctgatttcaaatcattataagtaaaaccatcccaattaaaaatatatccatatgctatcttcttattttcccctttactttcttctatataattgacgtgttcttcagtggaattttttttattttgttcaacatcatccaattttctaatttctttacttgctctccaataagaacgaatagctgacattgcatgttcttcatcaggtacgtttgctatctttaggtaacatttaccctgataagctattacaaattcaccttcaaaatcccacttttcatcctgctcaatttccctatataatgaataatcatctccatctctaccttgaattaaatagtttggtattttaaaatttaatcctttaaactccgcttcgggtggtacaatcactttcgtagttactgtatccatgattcattcctctccttttccaagttgcgataggtaagactttgaagttatctccatcttttcccccgcttagcactgtacgtgcgactttcatcgcatacagcgccccatcttattcttctatcctaaagcaactagattacaaacaatgttgtactcaccaacgtattcattcccttttcttacgaaaagtcacatcatcttactcgatcctgtgagttacatccagttgatttagttttcaaagaacaagactagggactatccctccacattcgttacatgcttcgtcggtactgtgtccccaccttcacaagaatgaagcaatttcggttcgttagaaccttatatgcatctgtccactagtagacgttcatgacagtttcttgcttaccacgttccgattgacctagctatacatatatccttaggtgcttgctttaagcctgttatctttacatcctcattgttagatgttccgaatttcatatcatttactcttacttttcggtagataacgtcgtcattgacgacatacacatttctaatgtattaatagtttagacccgtacattcgcaagttcgccagtccgttaggacattctcaccttagatattttgtagcatcccgacctatccattaccatatgatttctcacttaggttttgttcagtcgacttcacctagcttcatacaatttgtgactactatcacgctttgcatgtaggagtatcagataagtagtttcagctcaacctgacggctttcattcctactttcagtcaatcagttgttgttatcaaattgataaccctcctatttcgtgtttgcacacttatgaggaaacgtgtcgcacaaataactattttgtttaaatttcatgtagttcgccgatataagctgtaacatattgaatatgagattcttgattattttttccgaaacatgtctctattcggtctatgcttatacttggaaatctttcttccaataagcttatcaataactttttattagtatcgttatctactaattgcaattcgttatcttcttttataaggacgaatccccgatcacgtaattgttggattttatctacttcatcttttttatctgatattggttttttgctaaagattctgctaagtctggttaaactaaaagcgaactttacattcaatccaccatactcagtgaaggtcatttcagaaatatgattaaatccaatttctctccaccagcctttaattttattagttaatgcattaagttgttcactcaaaccatcaataggcttcatatcagccatctttttttctagttctctaatacgtaaatttgcattcctaagatcattactacgtctttctcgttccctagccaagtcagattcgtaatttgtttctttagctataactgaaatatgactttctgataaagaaataagtgtccccttcatttcctctgttaacttatcttttgataaccattcatgcatttgttgtgctgtaaaatataaatcttttaatctctttaaagtgaccgccttttgatcttcattcaaaacaactaatgtttcttggtttcccatctctcattctccttttctcgttttcttgtttttgaataaatcctgtacgctttttattttttttatctttttttataatttctaggtacatacttagatatatttcattcataaacttatctatttttactccctccgatctcgctttaatcattgaaagatataaggaaagtctattaaatttgtaaccactcttttgtgagaattgtcttcaataaattaaacttagaggtctttttatcaagacaatgtatgttagcacgatccgcattgtacccctttatacataaatgtatcttctcttgaaacgaatcagttttagtagatgcttcgtatataacctcgcatccaacctctttattgtctttatataaaaccacagtgtaaatgttaagaatatccttcacactgatccctcccttaattacaaagtaatgtaacaatatctactgctgtattatccgctacttgataatacatttctaagccacgtctttctgattttaatactctcgtactttttaattttgctagatgaacagatacagtagattgtggtatatctaattgtgtttgtatttgagttacattgctaatcttacatgaaataaggtatcgtactatttgaagacggatgggatgccctagagcctttagcatatctactgatttttctgttacagtttgtaaatttttttctactagtttcatattatacattccttttatattaattttgtaatgttgttaactaataatcttgtaaacatttgttctataaaactcttaatctattaaccataaagtattcatgaatactttatggttaatagaacctacaatcttttaatatcataattacattatacactaaatatagtttaaaataaacaactttataaactgtatttagtgtatttttagtgtcataattaaaaggaggagatataacctcgtccttttaattaatcacaacttgagctattgtcattgctactatcattatagttattcgaggaattatcaggtgaacacatcccacttgatttgtccgatccattatcattgtctagtattatgttattaatagtgcttgctgtgattaagggatctactagatcactagtatttctatgttttttttcctcagtaaaatgatgtacgtgtgattgtctattggaacgtctaactatattggttttgtcgctagatatttcaatttcttttttatccatgcttactttacaagatttcaaatttttatctttcatataatttacaactttatctacgtcttttcccataataggttcttcctcttgtttaaaaaagagcgacaatccttttgtgaagaaatatcccattaaaacaaccaaaccgagccaaacaaaaattcttattagtaaaaaccaatcaaatgctagattttccatattttcatgctcccttcatttgaatcttatttacacactattcgaattcatcaatacggaaatcctcataaattttcggttttttcatagttggcctattcccttcaaattcaacattatcagaccaatttatttttacttttttataaaattcttctaactcttttgatgttaaaagagacaataaaaaacacaactcactttctacctgaagtaaacctgaagtaatatatcctctttcatattcactttttttacctgcattactaataaaatcatgcatacctattaaagcaagcatccgattagtaaatttaccactgttttcatcgttattaaaagcttcatattttgcaaacatataatcattcctttttatagtgttcttaatcttttatccaaaaatccatattcctataaacaaataagcaaaaagcgcaaaaacaaatgcaaatccaaacactagacatttaccaaaggacatacttttatgatcttccactgattatttttcctttcttaatgaattttattccgtttctagcaataacatatttttaataggggattctgtttcaagttctttcccatcccttatccatataacaacgtcacgttcactatctaaccctctgtttatagtttttacacatagggctacaccttcattttttgagatgatatttcttacacgttttccttttatatcaaactcttttttcatattctcactccgtcacattctctatagtcccaataaacataaagttgacattatcatatttgaaaatttctattttattaactccttcttcatttacctctagataattacataagatggtatttgccatataaccagcttcctcttggttttctaatagatagctatcacaatctacaacagtattatccttctttgctacaaatgaatatatatctttcaaaataattcatccctttctccaaaatccccgttttttttgatataaaattcaaacactaaaacttttggcattctccattatactaagatttaatttcattaggttttttaaataaaaatcgtaatacaattataattgtccaaatccaaagtattactttaccaatattaagcaatagatatgttttattttgcattccactaactatatttgttgatacagtaggttctgtataaaaatccagtgaaaatagataagtaatagcttctattaatcccattctagcctgtgctgggaacacccaaaatgtcatcggtattacaaaaaacacaccaatccaaacaacagccccccaatcaatctgtttgatattatggataggtctttcaatcaaactcatgttatttatttttttcatgttcattccaccttttcaaaaaattattttataaattgaagaatacaaattacaattaagcaagtaagcattgctggtagcataatttttaattcatccggtaattctttctccaaaatagcaaatattagattcactattattgccaaaaatataaatagagctaaagatccaagaaacattattggtatgattgataatgaattcatttattttctccattcaaaactaattactttttatatcgttataccatgtattgctataagcattgtgcctgtcagatatatcataaaaccagctaatgcaaacatcttaagaaattcgttatttttttcactatgtccattaagcattctataaagaacactagcattaaaccctaataaacataaagctacaggtataccaatataccactttcttaaaggagcaaatatccccgaaaccacctcttgtatagccatttcattcgttaatccagcttgttgtaataaatcacccattgatgataaagcaagaaacattaaaaccatgaaaccaaatatactaaaaaacttactcattttatatcctcctagttccaaataaaatttgattttaagagagttctttaattctccatactccctctagttggtacttgttaacaagatattttaagaaatcaaaataactttgtcccgattctttatagtcccatgtttcatctaaaagggtagtaattacattaatttgtcctctaacgaaactggattttacatgatatttcccatcattttctgatttttctattcttataaactcattaatccgttcagtaagcatttctctaatagcttttgaggatagtataacttccggtatttccatactcatattttctaaattaaaatccttagcttcttgcttatgatatttaacgttcttattagggttttgtgcattataaaactccctattgaactctcttagtttattcaattcttcatctgaacaatgcttccatatcataccttcatctaatatcctttttttctcttcacctagaagtcctcgatcccttatctctttcaccatattttctaaggcttccaacatatcgtctactctcattttttgacctaaaatatctctattattttcaagaaacctcatgtacctttctaattcttctaatttcatcaactcatatcaatcctttcattttttatttaaattattactagtaaatacaccttcagcttttaaaaacctttcaagagcatcatataatttcatttcgttgctattacaatactcttcattgtcgtgaagaacgcttgcttcttctaatgtatccaaattacgccataattcataagacaacttatgtactttcttacgaatttctttaagatcaacagcttccattaaaaccactactttcataataaattctaaaactattaattttttctatttaacgccttttccaaagcattttaaacaaggaatttttatacctgtttcttgtaatccaaaaccaaatctatcttctttgattgaataactcttgctaaagacaaacccttttccattacaagatttacattttctaactctcatttctcttatccctccaataagtattcttgaatacctccgtttttaaacatccaaaaattcgcttatctaaccgactatcttattatatcatattttattaataaaacaaatatagtttattgataaaaataatgtaaactacatttattttaaaggggtgggtggtgggtattgatataaagaataagcgtagcttattttcaatgcctttatataaaaaatgagaacaagattttctatctcattctcattttttataactacttgatatattctccaaagctaaatttttcaatatacattttttaagcataggcattacaagttctaaatttaaaaataccataaataaaattttgtatgtaggaattgaaaattttacaagtaccgtccataacaaattaagaatagagtttgttacagttgtatttgtcacatggttaagatccaccaagaaacggtctattatctctacattagagataggcattacacataaaaaaataaatgacacaaacaaagtaaccacaaaaggtttaaaaataatattagttattgtttttggtaagctaaatataatgaccacctactttgttaattttttattttgatatataagagaataggctacattgtaacagttattccctatcttatatcttatttattatataaaaaacatacaataaatatagtttaaagtaaatgtttatttaaaacacatttagttatattaataaataaaaatggaatcattagattccatttttatgctcgctttaatcttttcttcggctctttcacagttctacttaatacatcaaaggcttcttgaatcatttgtttttcatcttcttttctttgtaagtacaactgatactcttgaaccaattcttccgcccaatcttcaatttctttatcttggtttggttgatagtccatgacattactgaatacaggaatatcagcatatctttcttcataattaaattcatcggctgtttcatcttttaattcataaacaaatccttttaaaacttttttcccgttttccatatcatgaatcaactcaaccataatttcggttttttcatcatctaaaaatacttttcctaattgcattattttacactccttttaaaatagtttttctaaatctaactctaactgaaggagatcactttctattataaatgaatcttcgctttttatatattgtccaccttctgtaagtttgtaaacatatgctttgtttttgaactgatccagtatccaatattcctttacaccattcttttcatataattttacgttctccactagatctttatccatattagaatgagataatacttctacaattaaatccggtgcgcccacaatacaattttctcttactatattatgatcagaaacaacaactgaaagatcaggttgaggtttggcatgtccaaaacgtccttttacatttcttaaatagacagtgtagggcgcaaaaatactgacatgcttcatttctaattgttttcttaattcataatatacattccctaatattaattggtgctttgtactaggtgttttatgctgattgaaactcatgtgcatattcccccataaaatcattttttcatttggcttttcatagaaactttactttacatactaccaatagtataattcttattaagataatagcaaaagacaagttgcaaccttgccttttgccaatgctgtttagagtgtgagggtcgattcttgcactcttttatttatgttcaatgaagtccatatacatttcacatttcgggcatttctttttgggtatgatttcactactccaatcaccttccttgcattcttcacacacgtattcaataaaaataaaatccctatgctcgtgttcctttttctttttattaatagtgatattgaacatatgcatttgctaaaaaccccaagtaatgattgatatctctattataaaaatctatttttcgtatttgcttttcaattactttttgttcttctattggtgcttgtttaatcatatctataacaatttcattttcaattacatgtgtaagtcctttatgtttaataacaaaaatatcacttggaatgtgcttttcttcaaaaaagcgttcaataaatgtacgtgatctttcttttactgtatacatattatctcacctcctttttttgtccgtcttcaaatcctaaataacatgctataatctctaattttcgattcatattttcttcccctatccattcatataattcttcttcaatctcttgtcctgtaacaacaatactctcacgttgatcgcacatactcgcaaacaattctatttgttgattcgtataatccatagcattatcccattcggtgaataaatgcacatgctgttttgattcttctagattccataattcttttacaacaataatttctgtatttttcatagaatctaatatataccctacatgccattcttgatttttatctgatttgaaaattaaatttacttctccatcataaggatttagtttaataaccacgtcctcattcatttctttagcaaaagccttataacaaaagaatccagcttcatacttttgatatacaatgtcttggatctcaaaagtattttgtctttccataaattcttttagatcttgaaagatttgttcttgcatgttttttaatgttttcatgttttttctctccttttttttgcatttgcattacgcaaatgatcttcccaaagggaattatttttgccatttgacatgaagcatggaacatccgcataggaaagttggcaagggttttagctgaaaaaattttatgtccgaatttttttcatcggaataaaaatttttcagccccttgccaattttcctgaatcacttagcaaaaaacaggttaaaccgaaggggaaactttgacctgttttttgcttagtgattctgcggtatgttacagtgcgtagtgcaaatgcaaaaataatataaataaaaaaagtaggcgttagcctactctccgcttttgatcttttgttttttccggttcgtccagcatgtgccttccttggcaaactcaggaggaacttacagagagtagcgtgagcgtactctctgtagttatccctgtgtttaatgctgtgagcgacacatatctccttgttagcttctgaaacgcctgtacaggctttcagaaggttataaggagtaagtgccaccgcccaagcctaaaaaagcacttattctcccttttagaaagaacaagtgccaatattctaattatttatcataaaaaatatctaccctacttaatcattaggtatttcaacagataaactcggttttgctggtgatggtgtttctccaccattaagtgacgcttgttttaaactactaaaactattgatactacatgctaaagtacctactaataccatgcctaatacaattttctttattttaatcattatttcaacgccccttttctcaaatgtttcttgtctgcattgttactgatataaaagtatttacttgctttaacatgatcatcagtttcatagaattgaatggccaacatttcggcatattcttttacgcaatcccacattccttctttttcaaaataagaaattgcatctgtaacaacttgttctaaacgtgctttaggtaattctgtgactaattcatttataactgcaaaacgatgcttatattctgcatttcctgattgaattgcgcttttcattccttgttctatatgttgttttgctgtttcaatatcacctaatttataatatgctctcgctagaacaaataatgctttataatgattcggaattttatttacgatttcagaactatgtcgaatagccaattcatataaatcttcaatatggtataaccatcctaaattgtaacgtacctttattaacaaatgttcttcatcattctttttaagaacatctattaccttattcagacattcttcagcccttccgaattcccgtaaatctatacaagctatactgtataggttatcacataatgcatgattgatttcatatcctatatgatttgaaaacatttctttagcctttaatacatgctgaataccttcaaatggttggtatgaatgatagtaaaaacttgccattctatattcaaattcagccttttcgatttcatcaggaatataaattaaaagttcttccgctttatcataatgtgcttttgcatcattgtaattggacaaaattgtagaatgtattgctttaaagaaatgataatagtaagccaaaaataaatattgatccttgattcccgaaagttcttctaccttttcaaacgattcctttgtaatattaattccttctactaacactttacatctaaaatcaagtagtgaataatagagtgaaagatattgatctgtttcaatttcttttaaattttcttctattttcatttttaactgattggatttctcgacatgatacaaacggatttcttcataccattcattcaataatcttattaattgctctcttccttttgtctgaatgctcataatatcccccttctttctatatacagtcttaattcgataataacaggaattgggtacaatgaattttactacaagatttctcataaataaacagaatattctgaaataaaaaagacatatcctatttttttatctagggatatgtctaaaatgacgaatcataactattataccgaattctagttgtttataaaaacattatgttcactttatattgttgctttgaaatattgattaaccgtcatgtataattcatatacagggttatgggtaggtaaatattcaaaaaaggatggaagaatgtatatgataaaagaaattccatttcaagaaggcgaaataattctttttaaagaagcgaatttgtggaacgatttgcttgaaagatgcaaaaaagaaacaaaaacgattaatatagcaacatacaattttaattttaagaataaatacgaaagatccttttataaggagttatctaaacttgctaatttaggaattgatgttagcttactatattcaataatgactttttctaatgaggataaattagagatagaagaaatatttaaaaatttcgtgttgtgtgcacagctaaaagccaatcactcgaaaatgtttattacagataatttcgcatacattggttcagctaattttagttttagtagtaataataattacgaatgtggtgttatttttaataataaagaaattgtttcaaagatacggaaactattcatgggggaaatgcttgaacaaagcgaattcacaaatgtccctacatcttttgatccattttattttttacctagaatactaaataatgttgaagaattaagtaaagtagaaaaaaaagagtccttgtatattgctagtaatgtagaaaacatagcacaattgcgttatttagatgatttagagaaaaatttaaataaactaggttttccaatacctatacattttgattggtggaaacttttttgggaacttgaggaaaagaaaccaatacctgatatcacatttaataattttaaaaactatctctatgcattatctcaatacttaaacactgtaatagaacatgttaacgcacagtatgagagcatcggaagaatggaattactgaagcgaattaaagtaataaaataaaatatagacttgaaataaagatcaatcaacctttatttcaagtctatatttagataaaacacctattttgtttgttccgctttaatagtagaaataagagcgaatgtaatcacatcaaataatttctcagggcaattggaaacgaaatgtgcaatcgcaatttctatcacttcgccaactgtttctacatcttttgctaacattttgattctttgtctttctgtttcatcaattctcacattcaatacgactcttttatgtgagacactaacttcttgatggatgatttctttcaattccttcattcttttactttgtaaaaacggttttaatgatgctacattatttgtctgtttaaatacatcatcaatcatcattttcaaaaactcaggcttattagtcgttgataattcagtaatggtagggtaattaaaatgttttataattagaaattcagtaaacttagatctcttatatatcatgtaagttgcaaggaaaacataattcatgacaggatctattttgtacgatttgttaggtattgtattgtttgtatccatttttcctacctctccaatacatataaaataaaaaaaggaaacaataacgagttactgtttcctttaacaatcaattagttcgataaaaatcaaaggtattataagcatcctctataatctcaacagtaacgatatctcttttgataataccatttttccatttcgctgtgaacatgaagtaaatattacctttttctaacttcgttctcggatcagtcatggatggttcaaaaatatcaagattatatattggatgacttgaatttaaaggctttctaataatgagatcctgtttgtttacttgcattcctttgaattctaatgtaacaaattcaatcggataatttgttacaatggctgacgtaacaaatttttcccctgatacaaattgctccggtaaatggtttagctttttatgaatttcttgccactcttttgtatgatccactttccctttaatactaagtggttcagctttaaaagagactttcgcttctcccttttcaccatgaggatctgttactgttgctttaaattcatacgatccatcttttatcgaatctattttatattgtaaggtcttccctgatatagctttcttttcttcaaatactttcttccagtttccttgattctctttcatttctaggataacttgtagcttttctttatctctaggatcttcatcactcggtaacatttctaaagtgacattatctccttcaaatactggattagggttatatttcaattcaattttaggtactgtatttacatatgggttagtggaaacttcattgtcgttttcatttatctctttaatcacattttcatcgtctacttttgctcgaaatgtatgatcccctgaatcttcagccttgaaagtaaaatattttgtagccttttctccttttttcatgctcttaatatctattgtttgtagctttttattgtcttggtaaaatgctattttaaatgcttttacatctaattcaccatcattaataaagtctactttcgccttatattcttggcctttaactaaatgattaatagctttgttatttgaatctaaaatagtaatagattgcgcttttaagtttgtcgcccgaatatctccaacatactcaacttctacatcccattttccgcttgtatcatactcattccaatgatcaaatacttccttagaaagtttacctttataagttgcttttccagtgaaatctttgagaatatcaggcaagttaaatgttcctctatattcctgagcatatctatatccttgcacttgctttatataatcaatccatacacctttacgatatctattagtcctccccgattctgatttccaacgataaccgaactgtgctgttttataatgccatcttggatcttcagcatcttgtacgtcccattcatcccatccccaatcctcaactatccaattctccttatcaggctctaatccgtaatatgtatcaggtttaaggggtttagaatcactgaagttatacatatcaccataataagtatacgggttatatgacataaatcctaaacgactatttccagcaccatcatagtattcagctcgtccctcacttcggctctgtatccacattcctttagaatccaccgaatatttatcacccaattgaggaacttggaaattaagggtttgtccacttctttcatcataatagttcttcgatatactagatggtgctggcgcttgccacgaataccttctaaatatgttgtcttcccaatgtccatctaggttaacagttctatttgtttcccaattttttgaccactcgacatttcccactagagggattttcccttgatacccatcttcattaattgtcacttcttttggcactaacgattgatcattagtatggtaggtattactaactgtttttgtaaactctttggtttctgtgcgatagatactatccttatgatgtaccttttcttttggtgttaatttaatacgtgtagcctttagaataccggtttgaccatcttgatcataagcgatgctatcaggataatcaccgtattcttgatttggatagggaacaattttcggattttcccaacgcatatctttctgaatttcaccataatgtatccatcttgtagtttgtttttcagcatgtgcttctttgacaggatattgaaatatgctacttactatgagagaagacaaagcgatttttaatactttatgtttcatgatatctcttcctaacttttaaatttcacttgttaaaataaggagaaaatttatatccgattgcaaattctgtatattgatcggagcattctttataagctgataaatctatttgctcgctaggaggttcgatattaatagtaagtcccctgttttttaaatcttctatatcccatacctccacttcaaaggcaatatccataataggtgtactattattcatttcttgtttttctagcattttcacttgaatactcatagttacatttttatctaattcacccttattaggattaagttcatatattttttcagtgtattggacttgattctcctgataatttttttgagaatctaaaaggaatttttcagcatgataatagattactcggaagatccgcactcctaatgacatgttttcccataataactttgagtgtagtaataattctttatgacttccatgtctagaacggattgcatccaaacatactttatatatttttacttttgatagatttatattttctagcttagattccccaaattctcggaaagttgttccttccatttcgtatatatcaaagaacatagatgcataaaaaataagttcatctaggtttagattcttatcaaacaaactttcaacaaacataagaacaagttctattttctctaaagataaatttgttaaaatatatttctcttcagtgtagtccttgttataaatacgaattcccttatatgtatttccatatagccttttaccttttaagaaattttgtacaataggtaaaaaaggattgtacttctccattgccttatgaaatagatcttctatttctcccaaaaacagagggtgcttatctttcaaataattatataaatccccttctattgttcttacctttgaaatatcctcttcagtgtattccagtacatttctttcctcttcatttaattgtgttttaaaaaacacctgacggataacagaaggggttatatgtgcttcttgctgtaattgaattacaaagttatcgtattcatgaatactcattgtttttgcctgttcaggattttcaaaaaaaacactggtatatttcatttgtttattctcctttattctttaatttccgtactatagaaggatttgtttattctttaatccgattctaaatacattcatattcttaacatcaatatcatgaagtaataaaaaagcttcaaacttttcgttaggaaaagaaacaataatttcaacatcaggcaagtgttttaaagatggtataatctttttaatatctttgactttcatatctttatttacatcacaaaacaattgatacacattaaaattatcattttcatttttgataataatgtaacagtttccatttctataaccttttactaaaatatcagattgaataactttcattttaataccccttagaaatttctatacagcgtatttttttatagcttcttctattgttttagcatctttttcttctgaataatctatataagctggtattaccttaccaatatttaataccattagatcaaacctttgatccgtagtttcgttataaaagcaatgggaataatagatagggatctcatacagcatccaaccctttatatcaaaccctttctcttggatataagtaatacagttatgaaaacgaattaatgaatcatcctcatgattttttttattgaagtaactcccctcttcaatttcttcaaaatgagaaatatattcttctatttttatctttatatagatattcaagctatttttcagtaattcttttgcaatttctatcttttccatataggataccccttatgatttaatagtttccttgctcttgttcaaagtcgaatgctctaccgatagattatggaattgttgaaatactgctttcataacatctatgtcttcttgatccacttccaattcttcatcaggcgatacaatttcaccagtttttaaccagcccttatacattgatacaaacatatcaatcgcttcttttgtattttcttgttttaacgtgtcccataattcttcatcaatttgatttataaaatgatctaaattgattgcttttgtttccctatattgattaacaagcacttcttttagtttttctaattcgatttgtgacaactcattaagatcaaaatgatattttagccaatgatatccttcagggatatattgtacaaattttaaaatatcctcttctttagaaaagtcaaatactatataacctttccctttgcaagtaaaacaatttcctttttcctccgctaaatcttgtaataaaccagctaaacactcttgacattcacagtctattttcatagttttcctcccaactttgatacattaaaattaaaactctcgaatcgagagatttaacaagtaaatctctatcttccaaagttctagcttacttactgatacataaattgaatggctaatacaccgatacgatttatcttatttttatcatcccaataaatatttacatcagcgtacttcccattaaaatctttctttattaatttatcaatttcgctataatcatttgatttcgtttcgtaaattgctgtatatactgtatctactccacatcgtacatcttcaggtattttcttatttgcatcttcccaaagttccaattgatatatttcctgtttaacttcttctactgatttttccttttttgtcatagcttctaattgttgatcaaaatactcttttttcacaccatcataacggttaaacacacctaatttttttcttaaatcgttatttattcccgctttttctggtggggctatataaaatttactttgagtttgctttgtggattcttttgatgctgtattatgatttacaaaccaatacaccgaagcacccattactattaaggccatacatatataaataagtaatttacgtttcatatcctaaccgtccccctattccttattaaagaagcttaatggattaaggacttgtccattcattctagtttcaagatgcaagtgtgcccctgtactatctcctgtcgatcctacatgtccaataatctgaccagctattacttttgcatcttttgatacagtaatagaatttaaatgtgcatatctagtttcaaaaccattcccatgatccaaaataactagatttccatatccacccatagtaccagcaaatgtcacagttccatcttttacagcccccacaggttgattcataatattaggcgctgatatatcgactccgttatgtttttctacctttcctgtgattgggtgaactcgttcaggattaaaattagaagttacattttgagtaaatgacaatggaaatactaaccctttttcatttgcggtaacgttttgtaattgtcctagattttgatttattggattaggagtctttactttatatgtgtaagaagcaacccttctaacaacccgatcctctttacttaaaaaatatttctttgtagtagtttcaattatcgctactagggtagggttttgaaatgtatcttgaaacttcagggtattcgctttatatttcactggaaatttggagttagattgatcaagcacttggaattcaaggattttataatctgtcccttcttggaatccagtgttatcttttaaactttctttaaatgtttgttttgcttttatagggtcaaacactagctttccatttgcaagttcatcttttttcaattctaaacttgcatcatgtacagctacctctagatcctcttttaaatacttagagctttttgcgtatgtggcaatattcatattcaaagttaatcccataacagccattaatacgataaataaagttctgataagatctcccacaatatcactcttccttatgtagtccctgtatattcgcttctaacagttctcttaatcttatagggcttagaattatcaatcttaaatacatcaataactgttaatggaggttgaggaatttcaaactcaatataaattttttcccctctagtggttactgtttcagttcccttaatttttatttgatccgctttataatgatggatatttacaagatagtccttcatttctttatataaagctgaatcatatttcccttgtaaacttgctttcttttgagtctcatatatagctaaattaatagtttcatcgacttgggatgcattgagaaataaagctggttgaaaaattgaccaaaggattaatggcatcaataatacatatgaaagaacttgattcatacgcacacccctttcatattttaattatttactattaaaagattgcttggtaaaagttatttgtatacttttctagtaagttcttatactcttgttcttctttttctgtaacttcaccaccctcaccataaatcttggaatacaacattttctccctcttttcttcctcttcagatgggaaaatgttaccttccgcaagctcaatgaattctattaaattctcaatttctttttcatttaaagattgttctagatcagcgcaaatacagaagtaagctaaattccaatgttctactttcaattgaattccacagatcggcaaataattaaaaatctctagtaaatacattctttcctttgtatttaaattgttttttccttttttaatatgttgtttaaggttacgcactacctttgctttgacaacatatcctgtatcttcatatcctgtagaaagttcttctaaatcagccatcccagactgatttctatattcgattacttgttcagcaattgtcatagggatagctaatgcgcacacattttgtctttccactttaaacatatacatcacaccttcttaactcttattattctcaaaataatgttctcaaaaataatgttctcgataaaatgttctcaaaaataatgctctcgataaaatgataatccattgaatattcaatggattatcataaaagtttgctcaatacttatttttaaatttgtagatattaaggcgctactttagtagaagtaatttgtttctgtacttctccacctttagtttgaactgaaggtgttaattgattccatacaacagcaccaattatcacaagtgttgcggcgattaataatatttttgaaattactgattccattttctttttctcctttatgatttgaatttttattttacttttgttccatcaatttgagttttaatttctgttccttttccttgaactgaaggtgttaattgattccatacaacagcaccaattaccacaagtgttgcggcaattaataatatttttgaaattactgattccatgcacattcaccccctttaaatatgactttttcctaaaatatcattaaacatggcaaagatataaataactaaccatgatatgattaacaaacttgttgtagtaaaaatcccaaacattaacgttttgcgttttccactctgttgcatttgtgcttcatagtaagaaaaagcaaatacgctagattcagcattaattgtttctaatgcttgctcttttgaagtttgatccattttaaaaataatatctcctaacgcttttgttccttccccaccaatatcctcataaaacacatctttagctttttcaggatcagatttccataatgaaagaaatctagcaattgtaccgttaatatgttcaaacattggtagagagtccctaataattccatatatattaacttcttgtgaaggatttaatgaatataaatcagcttttaaaacatcaaacaatgtaaatacttctgttattttcttttgatattttaatgttattaaataattaattatcatcgagataattgagtatttaaaaattggctctgtggctagatatatactccaaaccacaagtaggctcattacagaaaattctcctagcgttacatatggaatagctaggtaatagattgccaagaaaagtaatactaccattcttgtaatttgataatgagaagctttaatatacttaatttctgcggttgataatttttgctggaatttcgatttattattaactaaaatgaactttttcttcttttgttggatactttgagcaatttttgttctttgtaattttcgttcttcaatagaagtacatagagcataagtttgatatgctcctattccaaagaatatgagtaccaatagatagacaaacaaacttaccaataaatctatagacacatcttttacactcccatctatttagcaaatgtatttaatatctaaaattagaattatacaatttaggtattcaagaatactttaaggctgtaatagttcctattttagatatcggctctcggtttactcataacaatggctgtaaggactgaaaagattgacattactaaactaatcgtaaatagtattattggtgttttctgttggaaaacataccaaaaatctactactcctgagatcctatacgctaaaaagatcattaaaggaaataagaccattggtgaatatcctaaaattactgtttctaattttcttgttttatcagtttggatatcttgtttccttttctttatatcagcatttaaatccattaaagacatagtgatatcaccacgatctatatgtgctttctttaataattttgcgaaacgtttcgcaaatgttgaatttattgaatatgaaaatacatttactgccctttcaaattctaaattccctctatccttttgaagtgatgataatagtttcatatagatatgctttaattctttattttttgtttcttttacagcatttagcattgtataatatatatcttttgaggtactttgataattttggaataaaacatgatattcgattaagaatgcatactgtgtttttaatcgtaacattgttaatctatatctaattgcaacatacggtaagattccaaaagtaataccaatacctaaagcaaacactagatcatgaatcaaaaagtataaaactgaaacagttattacgaaaacaagcattgatgcaaacaagaaattaaacacatttatttttttactatttttagagatactcgaaagtagtaattctagatgtttaacaaatgggtgtactccgtcattcctttttgctgtttgatgtacttcttcccatcttttaatttctcgtctatttttccatcttctaaagttcttttctaactcaccttgtaagaagggagcacctaataaagcccataaaccataaaagaatagggagtatccaagaatcttagaaattgcttcaataaacaaaatcatgcttattcactcctaaaatataatctcttcttttatagttgtagttattggtgaacgttcacttctttcttgtaataattggataaatctttcagcctttttccgatctacagatttcattttctttatcagtgcttcggaaacttctgaattgtattcccatctttcatccagttcattatatttcattaaatagttgatccaagctttatcgcctttatagtcgtaacaaatttcataaatactcattaatctcttttcattttttggttcatcatttttcataataatgccaagatctaagttttttgctactcgtctaatttcattttctagctttctatttgcgtatgcatcaacaatatgttgtgctaattgttcaggcgttctagacggatcagtaatatgataggtcatcatcattccagttgtccctctttctgcccccttcatagcaccatcggcttcaattccacgtacctcttggaagattatgtaatcatgatctgttcttaaagccgaataaattacatcttcaatatttccattaatggtatacatgtcatatacgagtcgatcaggaaaatctttttttagaaaactttccggacttgtttcaatacaaattgcaatcttttcaggactcctactagcaaatattgtttttaacatagtagattttcctgattcaacatgtccagctataatcatattaagatacagctgtgatatgatttccattagttctacatcttcagaagaaattgtttttcttctcgcttgttcctcaaaagagaagtttttaattataaatcttcgaaaaacaattacagggaataaatttgctggtggacgaataatgttaacccttgttccatccttcatttcgatttcagcccttggattttcatgattaattttcaatcctttatggcctacttccaatgcacgaaaaatctcatagatatgttcctcgtctcgtaattcttcttcttgctttacaaatttaccatttattttgaaccatatttctttaccgatgatagatgctgatactgattcaggatactttttccacttataaaacgctccgaatccataaatttcatggaatagcgcttgagcaagcgaatcaaagaagtcaggatactttacatctagtagattctgttccctaagacacttttcaatttcttttgttaaaatcttttcggcttcatgatcacctaaaattgcattatgctctatttcttgcctttttatcttttcatcggaactaatacctctgtcttcatatatattttctatactttttttgacgatttctagtacctctgagaattcatgcgtttgttttacacttttggctttttccacagtgtaattaataacgtctgccactccacgttcctgtaaatgggagtttatatcaaataatttcggtgttactgttgacatttattttacctccttcctttttttacaggatgccaaaaaatttccttcttcttggcaattgaagttcatcattaaaaattaaatcaacactggatgcgattgacttagcaacagcattaattgactgtttgtatccgatatcttcataatcataaagtacagttcgttcaatctcagaaagcataccattttcacttttttctattgttgttaataatggaatatcaatatctttatggatatcttttgtagtaggcaaatgcgataagtcttcgaactgattaataatcattaacagatcctctttttcataaccaagtggatataaaatatcacgatgaaattgattaaattttcttattgcctttgtttgttggttcataattaaaaatcgtaaattactctcatttaatgcttgaaccatatttgcattatcaaaatgcgatccagcatcaactaagactacatcaaatgtctgtttagagtgttcaattaaatagttaatttcttctttagtaaataatctttccattttagtatcacgattaccacctaatatatataggttgggattaaccatatggaattgtgacagaaattcctgttcagaactaatggttttagatgctaacttacttttaacctgatccatataatttcctttaaaatttagttgatcagtcccactatcccatgcattcagtaataaaactcctacttttgcatttgtatattggcttaacgcttttcctacgcttaaacaggttgaagtagtacctatgttagaaactgaagagaagaaagttatgatattagttttctgtaccattgctagattaagattttgatcaataaaatcaacaatttgttctactactaatctaggtggaattaaataaatatccttactattacaaattgcttttactgtactttcaagttgaggtttgtattgattctctaacatgtaaaatacctttttattttcaaactctatagtagataattcactataaggtaatacacgatctgaaattaataaatatccatctttactagacttttcaacatcattaatctgttgtaccgaagtaaaaacttttcgttctttaattttattaattagcgcttcatcggaagacattacaaataatttcatatttgcataacccctttcttgttatctcccaaacttatagacaacataaattttgtatccttgacttgtataatcttttaatttattcaacattttttgatcagctataacttcaatattagatactgagcctgtagcattctgctgatcttcttgtgtttccgttacctctttatttccgttatcttttactgaagctactcgaacattctgtaaaatcggtttggctaacctcataacttctacatctgagtcttcatcagtttttaatggctctttatcatttttcccttcatttcccttagaatcttgaacaagggaacgaattacagcttgatctttatcaggcacaagataaaagtctgcaatgtatgtttttcgtaatgatcccggaaccgcaaacaaccaactatcaggaatcggagcaataaattctcccttttcctcatttggaattagattatatgtatccactaatttggaataaatttgagttccttttttaatatcaattgaagcatgtttatttaaaagaagttgtacatcttcaggttttaacgcatcatgtacagctatatcttttcttacagaaactacttttatgtcatctttagtaatttccgatttgaatttgatatcttgctttgcaacaattacatcagttgtattaattttgtctttaaaaactagttcataagatcccactgtaccaattcctaataccatcattgaaacaggtaatagtacctttaatttccttttcaacttcatttcttcttccccttcttaaaatattttaggtatgaatctagaccttttcttcacaccattattaggtaattcataaaattgacgaggtaatatttgtactagaacgggttttagcactttttcgattttcattttatattgctcattatcatataagaattcagatttccacgttaactctattaaatcctcataaggaattgtcggaaaaagaactaacggtttcttatctccaagagattcaagccatgtagtagtatcaatcttttttgtatatttcatatttataaattgataagttactccctctgtttcctcaatctcatttaggaaatcaatagcccttttttcttccctttgtacctcagcatcaattccaccgttcttaatggttgatagccaatctattttgattggatcaggctctatgcaaatataaatatgatcagcatggtgtaataaactttgtactgttggatcattcaaacgattcgaaacatctacaatagtaattgtcgagttaatcgaataaacaaatttcagcatttcttcgtatccaaatgactctataggctctaaacgtgaatctattacataccaatccacaccatgttcattccatacagctccatgctttttaaatgatctattcataagaagttctcttgctacatctacatattcctgttccttttcttgttctttaacaggaatagccaagtaatcaaaggtgtaaggttttagaactggatactcaacataagatacttttaatcctcgtccagctattgctttagctaaattatgtgcaaatgttgtagaaccagccccagaccacatagagcctactacaattagttgattaggaatagatgtataagatgttttaaatacttctttttctacaaccttttcttgataaattatcttttcctttttttcaacaggtggtttagtagctattacacttgcattcacttctttgatttgtaaaggatcttcttcactgggttgtagggaaaagaagtttaatatttgttcaataactagttcaaaatcggattcaaaaacagtaaattcaatgtcatttctgtttaaaaaatcacatatagattttgaatcaatcacttttgaatctacaacaatataatctaccttccaaaattcaactacatcctctacatcagttaccgtctgtacattcttttgatatatttcaacctcctttccatattcatgattctctaaaattgcgactaatctctcaaaagcaaaattggacttcatcgagatcgctaatttcataattccacctactcttttgtgtattttattcacaaaatttataacaaaagtcctttctaaaaaaaggactatgtttatttaatcaacgttctttcatcacaagaaaattgtaccatcttgtgtttaattaaacaacaatttttgtgtattttttaaacaaaaatgtttaaatatccgaattagagcatattttaatattagaaaagcttactattacgatagtaagcctttccattaatcttatgataattctcataaactactttattatctctctaattctagctcttcctctttttctttttccttcggcttatcttccagcccttttaaagaattgaattcattttgagcttgtttttcgctagagtaaaattctgtaactctttcaacgccattatatttgtctaacttccctacataccaaccgtccttagaatttattacttttaaatcctcgcttttttctttttcggcaacataaacattattagtaatttcttctcttaatccattatttcttggtagatttttagttttattaaatgcataatcaactaattcatccatagtttgaatttctttattttttaataatgtccagcctattacattcccactattttctgaaaggagtatttctttttggctaccataggataaatattgtcctacatgaaaattggtatctattttaatatcatttagccttttatctatatcatttctaatatcttgaactttttcttcaagattttcatttaattgttctttcatgtattgctttaaaacggtttctttgtgtaaagattgagagattgctattctcaacaattgattttgtgcatcttttctatttgtatattccttagatacaatgtctgttccacccatacttgcaacagcatacttaccctcagatatcttgtgtacttccagcaaggattcaacatgcttaaattgagatgcttctactagtttattattagtaatttctttatttaataaatggtaatctccttgtttatgaacttcagataatggaataatcatatttttattggttctcaaatagaatttatcatttttaggtgaatgctctaatctagctgatagaataatattgttttgtttgttaagtaattcaaattgattagtatttaggttttctttattacttagttttaatcctaaatctttttcaaagaactctacagcttcataatattgtttatcgttattttgatagaaatctagaattttgtctttttgtagttcatcaagagtagaaattatatctcttgaaacctcctgaatctcacgaattgcatttttagctaagtttagatctttcgcccatgtagctatatatcctaaagaaaaatcatccctttctagtccataattactagaaactacataagcaacactttccgcttgcgcttccttatgtcctctcggaaggtctttcatttcactttctttatgatgtaacttcgcatgtgcatattcatgtagtaaagtagcaaatttgtcatttgtatttttattttcgtttgtacttattacaatttcatttgtgttcctgttataatatcccccaactccttgatcagtaacactctccttaatatcatatggcgttgtttccttcacatgtttaaagaaatctttatataaattatccattgattggttatctgacaaactatttttaataaaatcacgcactttaggaatttctttacctacagtttgggaaacatcaaacacgcttaccattttataaccaacggttctttctacagtttcagtttgaactttaccattcttatctagcataggttcttttgtcacaggatctactttttcaacttttattttttgcttttgtggagcaaggatacggatacttttctcatattgtttcggacttctcccaatcttcttccaatcattaaagccttgcaccatagtagcatgtggcttttgagcaataattaatattgtattattagttgaataacctttaaattgcgacattacttttagtaaatgctgaaaacgatcatttttaaaaatttcttcaaggcctttttctaattttttattggtatcttcaactgttataaagttttgcatccttctcacactcttttcacatatactggtttaaagaattctttatcaaatttattaatgcttacataaccatcaagcacataatcattaatatcctcattcaaatgaattatttcttcataatcaaaatgttgttccccttgtttctcataaattgatttatctgtccctaaaatctcatgtttttctaacatctttagtcctcctatttacattgaaattcaaataaaactttcccatcattaaaaacaagtacactagcaaattcttttttgcctttaaaaccttttatcttactagttttccctttttcacataaggattttatctgtgtctttgtaagtttctttcctgatttctctttaggaaatgtttgcttacaaccttctttataattggtacaaccataaaatttttctttttctacaatgtgtccctttttacaagtaggacaaagggctaaataatcctgagaagctatttgttctacctgttccgacatatccatttcctctagttgttctttcgtggttgtaactaaatgttgtacaaaccgttctgtattggcaataaagttttcttttgtgccttcattttttcctattctctttaaatatttttcccaacccgctgttaattttggattagctaacattgtcccttccactaaatcacataaaatcgctccttttttagtaacatacgtccggttatttttaatttctatatactcttgtttttttaaattttcaatgatattaccccttgtactttcttgacctaatccttctgtctctttcaaagcatttttttcttcttgatctaatttgtctaacactttacttccaccacaggttttcatgagtataataagctcaccttcagtgtatcttttaggaacttttgtcttcccttcttttgttttcaaaacaaccgcacaattatcaccacgattaagtttgggtaaacttcctctttcatcctcttctttactatcttcatgatctgtagtgaataagactttccatcccttactcacttccaccttccctactttttcaaactttaaattttgaaggttcaaatcaattttcgtttcctcataaatataaggatgatggaacattcctagtacgctatgaacaatttcaaaatagatatttttttgcttgtccgttaattgacttatttgtttttctgttgggattttttcagtcagtacaatagcataatgctcctgtacttttttattatttacatatctagaattgggttctaatgaatatggttcaaaatctacaccagcaattttttgatattcttttaaatgttctttcaaatactcaaactcgttttctgtaatatatggcgtatctgttcttggatacgtaactagggttaacggtttatcatacaacgattgaaccgtttctaaaacttccttagggctatatttgtattttttatttattagagcctgtaagctcgataaagaatgtaatttcggtgaagatacctttttcacttccgttttcacttcttctacaatcgctgtatttttcgaatgcaaagatatgttatgctcttttagtttttcttttaacaggtactcagaatcaaatttttctttgtatttggcacaaaaactttgattatctttttcaaaacacccctctatttcatagaaagaagtcggtttaaaattggtaatttccttttcacgctcataaattaaatttaacgttggtgtttgaacccttccaactgtaaacgtgcctttaatcccttttttttgaagcaatccactatataaacgtgtgccatttagtccgactaaccaatctgaaacttgtctcgcctgcgcttcatggtaatagctcacaaattgattagcatcttttaaattttcgaatccttttctaacttctttttcaactaaactattaatccataatcttcttaaaggcttctctccgcctcctgccaagcgaattatactataagcaatgttttccccttctcgatccgaatcggtcgctataaccacatctgaagcgtctttcattagttttttaatagtattgaactgttctaccttattatttgataccttaaacttaaattctgaaggaataattggaagatcttttaaattccaatattttaatttttcatcgtaatctacaggatcataaagtgttactaaatgaccgatagcccacgttaaaattgctgaattcggaaacaaaggacaagctggaatttctatatatcctttctttcttttggtattcatgaatacttcctcgtaggcttcagcctgattttgcttctccgctaagattaaagtatatcccatttataattcattctcctttatcctaaattctatatgatataagtcttgttagactgttcataacatcaaaatccaaaatttaaagcttactttcaattttataagacgagtatgcacaattttgcaaactattatccatctcaaataaatgtccgtatttttcgataatcgagaagaattcttttttactgataggttgaggttctacaaatacttctcccacatcttttgtataatcaacaacttcataattgtcgccaatggcatcatgagggtagaaactaaactcttttgttttaggatcatacgctaccctcaacaattcagataaatacttttcttccccatcaactaaaatcatatgttcagggcaagagatatccccatcaaataccttcccaaaacgaatccatattgaaacagatgaaataatctctcctgtttcttccaaaataattctgtcttttgctaacaagactttatcgtactctaattgatatttcattttcatcttcctttcttatttgaacattttttcaaagcatcagttttgtttataattttacataaacaacaaaaccaataattagccaaaatggaataactaaaatcaatgcatttatacaaccttcaataaaagcaaatggtttctcttcaatctttataacttgttccactactatttccccctcataaaatcatctttcccctcacttcatacccctattaaaataattaaggcaattagggtatttaagatatttttaaaagctatttcttattggactaaaaagtttaactcttcatcaatatctttttcaatgtcttttatgtcctgtgaaagtaacttttcaatatcatcaatattgttagccaattcaacgttcttggctatttcagttttattgtcctccatactttgcataccctgtttaatttttataacggattcgatgctttcacttgaaaaatcagcattttccataattgtttcaagttctacactataatctacatattcccgttcttcttcaaaaagtgtcatattaatagactcaatcttttctctcggtagatattcgtttaatgtaaatttaccatccaagtaatctctagccaatttttctatcgactgaggtgtatttatatcatcattcaaattatcagcttcattttcctcatgaatattcaactcaacttcttcttttttatccatttgcggttcaggttcttgaacgatcttctctttttgtaaattaactttcacatctttttctaactcattatcagttagttcctcaactttcttatcattatgattaaatagcgaacgatatctttctctatattcatcataatttttcaagaaatctttatagataacaaattgccatgcctttttcaatttcaaagggtaatatccagaaataaacacataacaatcttgcttatctatgtttattaattctccttcagtaattaaaggtcgttttacatattgctcttgtactgacttagaacttgaagacttcccactaaacatccctgacggactacttaatgattcggatgtcatacgaactgtagtctcaccagctaaattagagtaatattttgctgtctcaggatctttggttcttaggaatagcgtaaagtcatggttattaataatagttcgtgctacttcctttccatataaattttctaattgtgcattatcttgaataattgtaatcatactcatgcctaacccacgacaagtagataaaaccctaccatacttctctatctttccaatattcgcaaattcatctaacaaaaagatggatggaataggtagtttagaatcattacgatcagcaatatcataaaatacagttatcaattgatcgaaaaaagttgctgttaatggcgtgaacggattttcatccatacgaatttttatatacaatatacttttctctttttgaaattccctaaaattaaaatcactatgcgtagtcattcttgcaactttttgtagtgaaaatatacctgtttgttgcgcaaaagaagacaatatacttgtccttgttttaccttcagcaatgctggcatctttcaacaaattgtatgctgggtgatcttctccaattgcgtcacacaattctctcaaataattttcatcatctgatacacgataaaattccctcttaacatcttttggtaaattcgcattaggattttcactcttacaatagataattaatccagctagtaaatctttggccgtattaaagaaataatcctctttatcatctttcttagagttttttgatattgttttagctaattgtaatgcctcttgatcgtctttcacgtaatccagcggattatacgcattagactcaaaatttataaaatcaatttgatatactttataaccttgatcttcttttattttatgagttaaattatacaactcacctttaggatctgtacaaataatggttctctctctattgtttattaaattatttatcgcaaaagcttgacctttccctgatcctgaagatcccacgacatttacattttgattatctaccgtagtttcatcatgaacaatgattaacttctttgttttaatatctctacctagaattatcccattttcagcctttaaagttttaaaagggtctttttcggagtatttactgtctttagcaattgctcctcctttaagtaactctagaattgttccccatcttgaagtaccatgaaccccgaaatcactagcatcctcatattccttatttttcaatcccattttagaaatcacaaagcccattgatataactaatactacaagatataaaatttgcatttgcttatcagttgttttcatgaactgaattgtgccctcataatcctttaaattatcctgaagattattgtgttccttcagcactctaagtaatccagcatagaaatatccaagtataccgcctatagttaaaccacataaaatttgaacaaatttatttcttccttttcctttcatcttcactctcctataattcatgacctccaagataattttttctagcttttttcttcatttttcgttttctttctaaatcattatctttggtttcttgactttgagccatttgaattagagtgttaaataattgccctgaatcacttgcgacattattattcgtttgttcttcaaattcatgttttcctcttggctcaaatccttttctatctgaaggtctgtaatgattttgttcataagacttatcattatatttcttttgctttagtagtaataaatcttcagataatatacctgtactttctcctgttaaatgtagaagtagtaattggctttgaacctttggagggattaccttaattgttacatcatcaatatttggatagtaaattttcatcatattaaatagtttttcttttaaggcttcttttctactttccttatcagcaatttgttcactaattgctgtaaatttaattgatgaatcatatactttttccgcattaaaattatcaaatgtgtgtttataatccttctgaattttagtcttagttctttctaaaattagcaagtccttatttacactatcccattcattcaatacatcttttaaattatgatgttcatcattcaaataaggattatccctattaaaatcaggaagcgattcatggattatagtattctctctaaattgttgcgtgtatgaaaacttaatatcataaagatccacattagatccatcgaattcttgtgcatactcaggatataaaaacttaaattcctctttagtaaattccttttgaagttcataggctcttaaagattcatcatatatcgtttcaaaataagaaattgttcgatttaattcatcttttttactatctaactcattagttctttccaataataaatcttcaaatttatttggaatgaatccataagctagaacacttttaggattcttttcaaaggataatttggcttttgataaaaccttttcttcagcatcaatttgtagttttttataatcaatttttttcttccaattatctaatttttttagattctcttttgcactctgataatcaaggaaaccaccgacacgtccagctacttttttaagtacttcccaatcaaactctgataaatccattgatctacgaatctgattaaattcatttaacttttcattctcaaatttttgacgataatcagataacgaaactactttttgttcaataatttctatctttttattggcaacttcaatctctttatttatctgagcataatgtgaagatggctgatattctttaccttctttttttgaaatttccttttgcctttcctcaaattgatattcttctcttgtaagtctcaatcgagggattttatttaggccttgcttttcataactttcatgagaaatccgttcaggaatattcatttttttataccattcattcactttttcagcataagattcacgccattttaacaatgtttctttatcattccaattaacagaatgtatccattttccatcttcattttttattctttttttcccccaactcccatcttcgttgaaaggtctaactgtcaacataatgtgcgcatgtggattatgttcacgatctctatgtatagatatatcagctaccattccatcacttactaacatcccattaacatattcttttagcatttctttttgttgttcattagtaagttcaacaggtagtgcaactaaaagttctcgtgataatctactattccagttcctctcaaccttttcaacttcattccataacttttcacgatcataagcccattttggagcatgtttaggagcaagaataaaagaatcgggttttacttctctacctctataagacttaaattccatatctctctcagaatataacttctcaccactacgatatgaagccgaagcaacagcggattgactagacttattaatattcctcacattgaaataaaacagactcattttgattcttcctcctttcatttcccccgtagggctattgtcgccagacaacgtttgaatcataactttggaaaagttttgattacccatgaaacagttaggaaactgactgtgtaaatgggcactcgtttctcttcgtgatcattataccacttcgtttttcccccaacaagtttcatagtggtcttatatttagatttctcttttattctctatttcttttctatataattcaaataggaggtgtaatcatggtaaagttacgtacagacgagaaactaaatgatattgaagaacaaataaaaaaactccaacaaaaaaagaaaaacctagaaaaacaaaagaatacaaacgttggaaaacacttatttgagtcttgggaaatagaagacgaacaaacagcaatcactttgatcaatatacttaaagaacaagcaaaagaaaaattaagaaatatttcactaaacggtgaaggttctaatggaaactaaggatgatcaattaaagaaaattgatcagaaaattaaagatttaaaaaagttacatcatgatacaaaaaaatctattgagagaaaaaaatcacaaaacctcagaaaagagagagctagacgtttaattgagacaggcgctttagctgaaaaatattttgaaattaccaatcttgatatttctgagcgtgaagatcttttcaaaatcttttctagtttcataaaagctaataaaccgaatcattttaaaaaataaagacacctctttttaaaagaggtgtctttatcaataccacaaagtattcatgaatactttgtggtattaaagaaaaatatttctaattttatcagagttctaattcattttcttcttctctttctttctcattttctttattattttcttcttttgattcatatggtttttcatatttttttccccaattcgtttcacctgtttccgcaaattctaggaatttattgtccatattcttggtacttgcgttcatgtgacggaattgcggattttcttcttctaattcattctgatttttacttcctttgctcaatgtataaacttctttgataccttctaaatttttcatgttatttttttcatggtctttaaaagattcagggataagtctatatttatcttgattaaataaagttttgattcctccatcaatttcttttccatttgagtcttttagactaaatacttttttatcattgtcatactcactattagataaatcaatttttaatttttcttttttatttgtttccacattaaaaacaacaatattcatttctttatctttttcaggattccatcctaaagcaaccattttaggtagcatttctttttgtgaagcctgaatttttttatcgaatgaattgtatttttcaaattcactccaatattcattttctttcttctctaaatatacatatgggcttccatgtttctgataaaactgagaatcttctttgtagatctttaacatttcatctgaaattgaattttgtttcttctcttcttttacctcttcaatttcatcaactttaatatcttttccttttcgctttaaatcttccatttctttctgttgttctattagatctttctcaattttatttactgattctaatgttttatttgttttttcatgattcatattcatttcttttcttaatttttgtatttcctcaataacttcgttattagtttctttaaattcttcagattgcatttttatattctcatctaaatattttaaaattacttgttttgctatttcaggatttttttctaaatactcatatactttttttgttttaccattcaattcttctttattaatactttccaatgcttttttatcaatatctttttctttttcttttccttctttatctttatctttatctttatcgttatctttctcttctttcccttccggatcacgttttatttttgataactctcttttcttaaaaatcgctttccatattctactcattagttcatacattgcttcactaaaatcatctcttgtttgttcagcattattcatagcttatttcctcctttttctatacaattatcaattaatttgatatacatttatagtataataaaaaaaaattaaaaacatataaaagcaaaataaatttaatataatatttttaaaaggtggctgaatttttttgaaacaaaatttagatattccattgcaaagaaccgacaaaaataaaattatggaaattaaaaaatcatccaaaagaagttatcttgaacaactacaaggaatttttaattactatgaaaaaatttctgtagaattatttgccgataaagttataaataattacgatcaacttaatgatttaaagaaagatttagttacaataacaattaaaaatgaattattcacacaagaagagtattttagaaagattcacaaagcaattcttactaaattacctcaactagagtttaaagaaatgctaataatcatgattgctcaatacatgaaagataaagaagatccagcttcactattttaaaaacaccattttaaataggctgataagcctattacacttcttttaaaccctcgtgaaaaaagagaagcatctacatatagtagatacttctcttttttcacgccttttaaaggctctcacaagacaattactccatttaaatacttaccccttaccaaaatatccaactcacgcccacgcctcttttaaccccttaaaacaaaaatacaattctcccttagataaatgtgctccaagtcaaaaaagacaacacctcaaaaacaaaacaaattctttttgaattcattaatggaatctttattacaaaaaataaataaacctaaaatgaactttatataaatccataataaattctaaataaatttattatgagtttctttttgattctctttctgaataaaataattgaaattcaaaagtatatctaaaaagaattcattttaaatcttttttacaccttatttctaaaaaggtctaccgcccacaaaaagaattcaaaatgaattcaaaaaagagttgttttatattttattttgttgtataattaactcaaggatgatttaaacaaccaaataaactatgaggtgaataacatgtcaaatgctaatgaaacacaagaattagaaacacgaactaagaattacgaaatggattcctctttcgatattggaaatgcaagcatcaaagctaagatcaatggagaaaaattaaaacaaccttctgtaattcaatatttattagagcaaccgcctgttactgaaacaaacttaacaaaacttgtcgctaatttagatgatgatttaacagtacatataactagtaatggcattaagcgtaatggcttatataacattggaaaaagtgcaactctaacttctgattcaaacgttgaaaatatgaatataagattagggaaaaaacacaaacatacaatccctgttgctatgacattgggtatgatggcttgtgaagctgtcaaaaacgcatttacagaagacggagttctcccttctacaattaatatcaaatctaatttaagttcagcaattcctatgagtgaatatacagttgataaagctgagtttttagagagacgattcgctgaaaatacacatgtagttgtagtttacgtaggtaagcttactgttactgtttttattacattcgaaagtgtaaaagtgactaaagaaggtgtaccatcactttatgctttaattgaagcggattccgatattctcaataaatacaatgaacaataccaagaaaacgccaaacctaaagattttgtaaacaaaaaaatcttgcacgctgatattggtgacggtacaacagaatatgtttacacacaaggcttaaatcctattccaaaaaactgtacaggtgaacgtcgtggggttggacatgctactgaagatgctatcaagctattaaaagaagatacaaacggacgtgttcttttaaatcgccaacaatacatgaatatcctaaatgatcctactcaccgtttgtatcaagatgcatctagatttttagaaaacagcaaatacattcaagctaaaaaaatactagaagatattgaagaaaagtacacagaaaaaatagccggtgatgccgatttcatttgtgtatacggtggtggaagtatagaatttgaagctttactttatgaagatttactagagttttgtgaagaggtaaattgtaagttattatggattccaaaagaatatgctgttgatatgaacatggaagggctatccatattaaacaaaaaaatcttttttaaaaaggggtgaataaacagtgtcaagagccaacgttagttggaagataaaagatattaaagatgaagaagcaagaaacaaaataaataagtggtgtgatcagcaagagaaaatacaagtttcattaacgagcttagtacttcatatgatagaccgtttcggctataaaaatattaccgatcacgatattcaaaaattactacatcaagagtttcctctcacaagtattacaaaagaggtaagcatttctgaacctatagaaaaaatagaggaaacacctgataatatatctaagcaaacaaataatataactacttcccctaaaaccattgaggaagcaaaaaagaaccctgtccctaaagaggtacagagttctagtgaagatgatttatatgctcaggttgataagaacgctttttaaaagcgttcttatcaaccaccaatacccttttaggcttttttcaccactatcagtaaaaaaacaatcccatatttcaacaaaatatgatatactcgttagcaaagatatgatttctaatttgtatctttgctattttttgtaaaaaaacaacatataaagatgtaaaaaatataaaaaaatataaaaaaagaaggagcaccgacaaccgccaagtaatcgaactcctctctaattcctattattattaatttaattataatcttctacattttgtttgtcaatgttatattggcttatataaagatgcaataagattgtaattttccccaattagagagttcgatgttaaaagtgcccttctatgtaaataggaggttttttatatgtctgaaacacaactagtaggccaaacgcctacctttattactcagggacatgtcccaaaagaagaattaagactaccaaaccaacattttataaccgcaatggattggatagataaattaggagaatccgcttactgtgattatttaaaaatgtatacaatggctgatcgtagagataaagatagagaatatgatagagttccaagagcgctttctagtttatgggaagctttagaccgtaaagaaaagtattttcgtcaaaagatacttattccattatgggaatatggcttagttgatttagtagaatatcaaggagaacatgcaagagctggacataagcctatgaatatagttatttatcgttacccttgtaatgacattactcttttaacaaagcctttagaaaaagtacgtgactggaaaaaagactataaatcatcaggaaagttctatgctataaagggtggaagacctaaaaacgaactaaaggattctccacagaatcctttagtaaaggattctctacagaaacctttaaaggattctccacagaatcctattaataatactaaagaacttaataatttattaaattattttagtaagtatgtaagtatagatctatctcctatcgacttttttaaatttgctattgtaagttcaccatcaaaatatgtagagattgaattaaataatttaactactacatatggaaaagatatagtgaatgaagcaattaaaagaatcagtgacatgaagactgataaatacatagctactataaaaggtattatcaagaaatgggtatcgcaaggaatgaaatctttttctgatattgaaaatgttgagcaagcgtatcttgaagaaagaaaacaattacagaaaccaaagtctcaacaaaaaccaaactctcttaaaccatcatacggaaagaaagatattgttcctgagtggcttaaagaacaaaaacttaaagatgaagaagtacaaactaataaagagttgcatcaaaacagtgagagcatacaagtgactactgaaactattaaagaaaagattcgtttttatgaaaaaaagctaaataaatatattacagaagacattacagaagacaattggaaagtagctaagatctacttagatgcaaaatgggattggacagaaataggcatattatttaaagaaattgatgaaatgaagaatgcgattcaataaaataaagtgttaaattcaaaatgaattcctttggattgttaatttaaattcagttagaattcattttggatttcttttaaacctcttgtcattttaaatagaaatatagtgtatagaaaaatgcttttcccttactattttgtggaagcattgggtgggggttcggtgggctaagcccccgagaacttccgtattttattatcgaataaaatattatttatgaacgttaaactagcgattcgacagggtatactagttaatccaagctgtgatgatcatcaccccctattttgttatcagcttggtgatagctgataacccagtcgaaaaaaatttgtaaagagtaaggtgtggagattttttgaatggtttctcaaaaaatactacccgttctttacaagatttttagctttatatgttaagagggattttttgagtaggatctacataaaaggatttctccagtggcgtgtcaagggaatagcacaaatgtttttagagttgatgttgagttgggattttacaagttccacaatttgctataatgctaatgcgaattgtggaacgccataaaagcataaacgaaacacagcgattaaaaatattttgcccctttacacgccacttcttcgggggtatatagcccttctttggaataagaaaggtatacaacaggcatagaagattttgaactcaatctatgccttgtgtatattaaatataggtagttagtttattagtttcgttgttttatctttaaattcttgttcatagacaacaatattgtatttatcacaatttttatcattccatgaattgaaataataactatcatttgtttccataatgtctagagtatcatgttgccctttaaagtcttctagagtaaggctattatcttctagatatgtttttgcttctcttttagcaaatattatcgcattattgatatctttgaataaatagactttgcttcctgttccgtcattataaaaatcatattctactagaactactattgggatacacatataaaattcctccatgataataattttttataaattatctattgtgggtcataaggtttgagaattttgtttttagatatattaataatttattaattaatgagttactgtaagtttggttattaatctttttagctattgttctatctattgaaatatctgatgctatttcatcaatacatctactaaaagcatttagattaataattgtattatgaaaagtatcatctacctcacattcataactaagttccagtaaaattgtttgaaatttatgcaataattcttcttgtccttgtttcatgttaactactccctcgtatagtatgtttaaacttaatttttttactttcatgagagacctgtaaaaaataaagtattgttgtccttattcccccttttcggggggatgggcaaaaacaccctactcctaaattccaatcacttacaaaaatcctggataataaaaaatggacaaagctacgaaagttagcacaagagaaagaggtaacgccttccgctctactttgtacaatatatggtgatgtgttggcatattggagtaatcaacgtcgattagcaattaacttgactgtatttaaccgttatcctgttcatgatgaagtagaacagattgttggagatttcacatcacttattttattggatgttgatgtaaaaccagagcaaactttctttactagagtaaaagaaacgcaagctactttattagatggccttgaacatcgtcattacgatggagttaactttattcgagattttactcgatatcatcagatgacgccaaaagcagttatgccaatcgttttcacctcgatgttagcaggtgcaggtgctttctcttgggaacaacttggttctcttcgctatattcatgctcggactccacaagtgtatttggataatgtagtaattgaaaaaaatggagagttattaattagctggaactatgttgaagagttgtttgatgttgatgtaatagaagcaatgttttcccaatttgttgacttattggaacaattggtgaaacaaagcgatataacatctttgcatatgaaagaatcggatcaaactctaattaagcaatacaatgaaacaacagaaaaaataccttcaactactctgtatcaattatttacagaccaagtaaaacgtacgccggatgaagtagcagtggtatttgaacaagaatggttaacatactcggaacttcataaacgttctaatcaaattgcccacttcttaaaagagcaaggtattggtctaggtgacaaagtgggtcttttagcaaaaaggcgagttgacacaattgttaatatgttaggtattttaaaatcaggtgccgcttatgttccgattgatcccgatcatcctttagatcgccaaacatatattttaaaaaatagctcatgcaagcttttattagaacctagtctttatgaagaaaatcatttgtcattttatacaacagaagatatgcccgctattgctggtccagaagatattgcctatattatatacacttcaggaagtacaggaaaaccaaaaggagtaattattacttaccaagcggttacaaatactattcaagacataaatcaaaaatatgaggtgaatgaagatgatcgtattattggtatctcttccatgtgttttgacctatctgtatacgatattttcggagctttaagcacaggtgcaatgttagtaatgattcgtgatccgagagacatgcaagaattaatccgcactgtcgaacgtagagggattacaatttggaatacagtgcctgcaatcatggatttggcattggagcaagtaggttctcattttgaatatccttctttacgtttagttttacatagtggagattggattccgctttctttaccagaaaaaataaaacgacattttccgattgcagaagtagtctcactaggaggggcaacagaagcatcgatttggtcaatttattatccgatcaaacaggtggcatcacattggaatagtattccatacgggatgcccttggcaaaccaaacgtattatgtgttgaactatgaaaagaaaatgtgccctgttggtgtaattggagatttatatatcgggggagtgggccttgctaaaggatatgtaaatgataaaaagaaaacaaatgaagcgtttgtgtcacatcctgattttggtcttatatataaaacaggagattgtggaaaaatgcattctgagggatatattgaatttttaggccgccaagattaccaagtgaaaattcagggatatcgagtagagttagaagaaatctctcattgtcttctaacttataaacaagtcgaacatgctgtcgtaattgatcaaacagatgagaacggaataaaatttttagttgcatatgtggtaactgagcaaaatattagtacaacagaactacgaaagcatttgcgagatcacttgccagattatatgattccttcttattttgtttatttggaccaattacccctgactccaaacgggaaattagatagaaaagcgctccctactccggagaaacaaaaaaataaagtatttattgccccaaaaactgaaatggaaaaaatattaactagtatttggcaagaagtactcaaaatagatcaagttggagtaaatgatcatttcttcgccttaggtggagattcgataaaagcgattcaagtgtccgtcagactgtatcgacaaggattcgagcttgaaccaaaaaatatattttcatttcctatattaagggacatggttcaatttgttaaaaagctagaccagttttcaagttcacaaacaaatgatgtaaacataatgaacgataataaagctacattactaaatgttaaagataaacaacttaatcaacatacacttaacaaaatacaagaaaaaatgccggatataaaaatagaacgtatttacccgttagcacctttccaggaagttatttatgagcatgctacgaatgaacctgatacaaatgcatattttgaacaaacaatttgggcacttgagggggagctggatattaaactctttattcagtgtttccaacaattagttgatcgtcatgattctttaagaacaataattgtgcaagatgaacaagcaaaaccttggcaagctgttctatatgatgttcaaataaattcagaaataaaaaacttgattgagatgacgaaacaagaacagcaagaattcctaaaacagtggatgaatgaaaatttaagtcgaggatttaaaaatgatgaacttatgacacgtctctgtatattccaactaggtaataacgagcataaagtaatttggagttcccatcatctattatgtgatggttggagcgtcagcattttgatagacgaattattccagctctacgaaactacaaatgccggaactacggcggggttacccatggtaaaaccttttgaaacatttatagattggactttggcacaagatcatgagaaagcacgtcatttttggcgagattatttatcaggatacaatcagaaaattagtattcctaaaaagaaagtcccatctaaaagtgaagggttaaacttcacttttatggatttaacattagacaaggatttgactgatcagttacagacatttgtaactaaaaataatataactatgaatacggcattactagctgtatggggaatattgcttggcaaattcaacggaacgagagaagtagtattgcctaatctagtatcagtcagacctcccgaagtagaaggaattgaaaatatgttcggtctgttcacaaatgttttgcctatccgattagcatggacagaaacgcaatcttttgtggacttcctgcaaaaggtacaactagagacattgaaatgtaatgagtatgcatactattcatttgttgatatacaaaagcaaagtgaattaaaaactgagttgactgaccatctttgggtttttgaaaactatccaactaatccagcaatcttttcttcaaatgaaaacagacattttgctatcacggattacgaagttgttgatgagccacatgtaaagtatggaattatgtgcttccctgaagaaagacttacaataaagtttggatatgatcaaacggtatatgaagcagagaaaatacaggaaatattaaatcacatccatgggttaatcaacacgattcttcaaaatccaatacaaacaatttgtgattacaaattataaaaaatgaaaaggcgagcaagaactcgcctttttaaatagaataggagtaaatcaaatgacaaaaaaattacagttatcagccgaagaaatgcgtcagttaggatatcaagcggttgacttgattgttgatcatatgaatcatttaaaaagtaaaccagtttcagaaacgattgatagtaatatttttagagacaagctaattgaaacgattccggaaaacggatctaatccaaaagaattacttcattttcttaataacaatgtgtttaatcaaattactcatgtggatcatcctcattttatggcttttgtgccaggtcctaataattatgttggtgtattagcagattttttagcaagtgggtttaatgtatttcctacagcttggatagtaggtgcaggtgccgaacaaattgaattaacgacaattaactggttaaaatcaatgctaggattccctgattcagctgaaggactatttgtcagtggtggttccatggctaatttgactgcacttactgtagcgagacaggtcaagctgaataatgacatagaaaatgcgattgtttatttttctaaccaaactcatttttctgtagatcgagcacttaaagtattaggttttaaacagcatcaaatttgccgaattgagacagatgaagacttaaaaatttcagttagtactttaagaaaacaaataaaagaagatcgattaaaagggaaaaaaccattctgtgttattgctaatgcagggacaacgaattgcggagcggtggactccctcgatgaattggctgatgtatgtggtgatgaagatatatggctacacgtggatggggcttatggggctgcagcaattctcagtgaaaaaggaagggagttattaagtggaattcatcgtgccgattctttaacgttagacccgcataaatggctttttcagccttatgatgttggttgtgtacttattcgaaatagccaatatttaagtgaaacattccgtatgatcccagagtatattaaggatacagaaactaatatagaagaaaaagtgaattttggggagcgtggaattgaactttctcgtagatttagagcattaaaggtatggctttcttttaaagcattcggagttacagcttttcgtgaggcaattgatcatggcattatgctagctgaacaagttgaagagtttttaaggaaagaaaaagattgggaagtagtaacacctgcccaattaggaattgttacttttcgttatattccatgtgagctaacatctacagatacaattcatgaaataaacaaaaaattggtggaagaaattaatcaaagaggatttgctatgctaagtacgactaaattaaaagaaaaagtagtaattcgactttgctctattaacccaagaacaacaaaagaagaaatacttcaaatcatgatgaacataaaagcattagcagaggaaataaacacatcgcctaaacatcttatatctgtttctcaaccttgatatattaggcggattttacatattaatagccgattcttatttagaatcggctattatatttaaatgataaatacatatatactatttataagtgtttctcttgtaatgggattaagcctcaaccttggatactcgtttgaaaccagtctttattgcttgtactatttcgttcacagcataaatagatacatcggcatttggatttaacccttcaaaccagtgataggcatttggatataaatgaaactccacatcaacaccagcttgtgctagtttgcttacataggttaatgtttcgctgcggaatggatctaattgaccaacaaatgtgtaagtatacggtaagtcactataatcctcagctcgagaaggtgctgcataggcagggatttgatccgttccatacatttctcctaaatacattttccagccagcttcatttgccttttggttccaaacaaatccctctttaatttcattcgctgaaggtgtatcatttctgtcatcaatcattggatatagtggcatttgtaaacaaattgaaggatattttcgatctcgtgctaataatgataatgctgctgttagtccaccgccagcgcttactcctgcaaccccaattcgattcgaatcaatgtttaatgactttgcattatcagcaatccattttaaagctgaataacaatcctcaattggtgctgggtaagggtgttcaggtgctaagcggtagtctacagacacgaccacacagctagcttcttttgcaaacctcatacaagtatcatcgttatcatctatagaccctaagatataacctccaccatgtatccataataagacaggtaaagattcatgatttgattttggacgataaattcgtaatggtaacggattatcatcaggcccaacaatgactttatctgttaaagaaagagagtcatcaacaacggtaggtggtctcatttgagctattccttctctgattgattgcaaattttctgggcgtaaatcgagatccggaaacatctctaatccttgtaataattctggatttactctagttttcattttagcacctctatttgtaattgttttcaaataaatgaagtgtattctaagtagtttaattgtgaaagaacaccacaattaaattgtaaattggatatgttataacggtcaacagaatattcggaaattaaaacctttctcaagaaggagtttcatgcaatcaataatacaagtagtggatttaagagcaaagtggtttaatgtcgttgtaattatgtacattagaaaaatttatttttgagtctagaaaaggattagattcttttctagactcatgaagaattatgaaaagcaaaattttatagatagttatcttaaaaataaacaaagagagaagaactagccaatgttcttctctctttttcatatgtaattagggtatccataactgtaaatacggatggtatagatttatggatgaataatttatttttaaattaataacgtaatacataaagatttttgtatgtaatattgcatatacagggaccactggtgaaaatgctgagcaatgtttttccatatggtaaattagttccttagttatttattttatttcattttcaatcgtgtaaggcttggggctaagatttacaaaggtgactagtaaaaaatataacaatataagtataagattttgtacttagtaatctcacaatttaaggcatgacattggataagtgtgaggagttcaatcgattttgaataaaatcaatagtatcagttgcaatttttttacgtttaagaacgatcccggcatgcccacatttataaatatatcgtgtaggtctttcccaagattcccacaagtagtctgtatcctcagaatgcacatatagatcatgcttacctgaaattaataaaatattttctttttttacttttggcaatgcttgactcggttcagtgattttccaataatctattaaatcatcatacgtaacaccatgatgttccaagtcttctctaataaatttacctggagttgtattccaaatagaataagaaagtcgatttgcatagaaaatggatgctaacacatcaatttcttcttcaacaagagaggttaagttagtaataaatccgcctaaactaattcctattagaatcagggtcccctttttatttgctttaatccatttaatcaaagctcgtaaatcagctaccgcttgtctagttgcttgtaatgttcgttcaatatttgcacttaccatatactctccactgaataaggattgatcgggttttctttcaaaatgatagggtagagtgaaataatacatattccacttcaggctggtcatatgatcgtggaatatttttttcacacgttcgttagaatccattctccaaccgtgaacaaagataacatgaggtgcattttcattttcatgtaagaataattccccagttacagagtcgttgcgtgaatcaccggattgaaccgaacttttatagttgaattgcccaaccatgtattcattttcctgctttgaatgcttaatgtcaaaatgaaaatgtgatggttttactttataaaaagattctatgttctttatatttaatgaagtgttagaaagggaagtaaactgaaatgctacacttctttttttgtgtaaatcatataaggcgtaccgatcaatgagttttgaaaaaatcaaattaacctcctccaaaatacatattgtttaaaacatagacaaaatttatgttttaaattaattaggaaatattctcttttcctaatagtaggtgcttgaattataaaaataggtgataaatttgtatattatattataaatcgtgcaataaaataaaactataaataatttatattaaaatttaagaagaatgttaacttgtttcttttcttattaaaagatgtaatttctatgaggaacttaacaattcccatctagatattcacaaatagcttctctatatttattgtatagaaattatacaataaatatattttttatattatatacattaaattaagcttaacctctttttctataagtctcttaaattgactaactccttaccaatattcaaaaacgactgcatttttgaatttgtgttctagtttttcttgaacaggtaaatgaataactacacataaactccttatatctctagttaaactaccgattagctccatataaactctagataacctatatagaatacaagttatcaaggaggtaagaaaaatgaattttatgaaacgagcaattctcagtatgaaaaaaaggataggaacatcattaattttgatggcagtttttctgattgttacaaatttggttctttcaggttacacaatccaaaatgcatcaaaaaaagcagcggatgctgcaagaaaaaaacttggtgcagatgttactttaggtcttgatttcgacaaaataggtcaaaaagctaaggaaactggagaaatgccaaatccgccgcagctcgatgcaaaagaaacaaatcaattagcgaagtccaagtatgtaaaagattataattacatagctaacactttcggtatttctgatgggcttaaactagtaggagcttcagaaggagaagaagaaggaaaaggtaaagtgggaatgacggctgcgcgaggcggttcaagttctggtacagaaatagatatgaatgcttcttttatgattgagggagttcgcaagactgcattacaagaaagctttaaaaacggaaaaagtaaaatcattgatggaaaaccaataacagagcaaatgaaagatcagaatgtagctttaatggaaaaacgattagcggaattaaacaatttgaaagtaggagacaaagttaaagtacaatcaggggataagaaggaaactcttgaggttgaaattatcggcatttacgaaacaaatgagcaagcaatgggtcaacaggctcctcctattatggatccagctaataaactatatatgccgcattcaactatgaaaaaattagaagtagaccaaggtataagtagtggtcaagtcgtgtatttcttgaatgatccacaatatattgatgcatttaaaaaagaagcaaaaaaatctaacattgattttaattattataaattagatgcgcatgattcattgtacaagcaaatgattggtcctatcgaaaatatctcttcgacttctcaaatgattatttatattgtatcgattgcaggtgcaattattttaggattaatcattatgctatcaattaaaggacgtcgtaaagaaatgggaattctattgtctattggagagaaaaagtggaaattgatagcgcaattcgtagtagaagtagtgtgtgtcgctattttagcatttggattatccataacaacaggagctaaagtttctcaatatatcggagataatttactttcgaatgaaattgctactgcaagcgaagaaacagatacttcgcaacatggtactgtaatgatggctggatctggtggtactctacaaaatcaaaaagaagatccaattgataaaattgatgtaagtgtaacaggagaagatgtagggaaaatgggtggaattggactagctattgctataatagcaacgcttcttccagcattatctattctacgtttaaacccaaaacaaattcttttaaaagatgaatgaggaggcttaatatggagacgattttacagtttaaaaatttggattattattatgaaagtaatgggaaaaatgtagcgatactagataatgttaacttttcttttcaaaaaggacatttctacacgattttaggaccatctggatctggtaaaaccacaactctgagcttaggttgtggactggacgtccctaaaaatggttatgtactgtataatggcaaagatattagaaaaattggtttggatcgataccgtaatcaaaatgtatctgtaattttccaatcttataatttgataacctatatgacagctcttcaaaatgtcttaacagcaatggaaattacgggtgttaaagtgcaaaataaaacagcaagagcattagaattgttagaaagggtaggactcacagaagttgaagcgaaacgaaacgtcctgcaactaagcggtggacaacaacagcgtgtagcaattgctcgagcactatcttgtaatgttgatttactgattgcagatgagccgacaggaaacctcgacgaggaaactgcaatggatataatagaactatttcaagaacttgcacataaagagaataaatgcattattgttgtgacgcactcacaggaggttgctaaaaaatcagatcgtgcagtgtatttaagtaagaagaagttggtcgtaaatgaaatctaatataaacatcgtagttttttaattcacataattttcaaaatctagacctttcaaaagcttatatttgatttataataaaatcaagccataatcaaaatggtctccctgtactgaatgttaaaatagtttgttgttcccgttttaataatataataaaaagaacttgtaggatattctacaggttctttttattataattggttacctatatcatgggataatcacacataaaaaacgggacattacctagatgtatgacctaaatatcgtcccgtttacctactctgtatagttattgcagaattaaacctacaatcataattaaactaaatactattatccaaccaaacgcacaatagccaaaaattctaatccatttaggtaattgatgcatgttaattttatttgtgggaactccttgcatagaaaacatcattttttgatctctatctctattattttgttgttcatacatactatcatcacctttccagaactattgcgtttatagtatatcagcctaaagaaaattatgtacagaataagaagggatagcataaatattatgtggtgaattttataaataaatgcatttaattgccatggttctaagcgctaatagagcactacataaataggactcattttcttcaaatattaagttgctggatatagatcaggaccaaggtaacgttcttttataatttgaagatgatgaagctcatgaccagcaataatgtatgctaatgcatgaactgtaacttcagaattattcgcatttcctctttgtgaccaagcttctttatctaagcttctaagtaaatgcagggtagattggcgaacaactattaaattcccaagaagatcttgcatagattgcttatcaaaagcagctctaagaacatacatatcatcaaatgaaaaacctgttaataagtttatacttactacaaaaacaaacaaactcgtcctatttaaaggagagtttgtttgtttttatgtttagataatggaatactcatgcaaaattgcacactatgttccatatttttcattgaatactttatatctagtgtttcaagaatttgtttaacaatatatagccccaaaccatttcctccagtatttcgatttcttgatttttcaattcgataaaatggtttgaaaatttgttgtaaatcttcatctttaatattgacacctgtatttataatttgcattttgatttgaccttgtttcgaatcctcatttaactttatatagactttttcattatgtggtgaatacataaccgcattgtgtataatatttttacatgctttttctaaaagagcacaatctgtataaatagaaaggtcaaaatcaatttcttttattatttcgatgtttttttgagaagcaaaaaattcgagatcttttgtaattgtacctattaattttgaaagattaactttctctacttttagtttgaaggtgtgttgttctaatttcgatacgcttaaaatttcacgaactaattgttccatactttcaataatttgatgatttttctttaaatattgatcgcgattttgataagggccaatattgtatatcattccttctaagtatcctttcattacagtaagaggggactttaattcatgtgctacaatcgcaaaaaactctctgcgttttgtttctatttctctttctttttcaatatcattttttaattgttcatttgctttttttaaatcaaacatagcttgttgcaagttaatagacatgtcattcaaactattagataattctcctaactcatctgtagagcgaacctcaattttttcggagaaatctaaatttgccatcttttgtgcaccttcattaatataaataagtggctttgtaataaacctggaataaaaataagcacttcctataccaataacgagcacaatgatactaatataggggagaaagcgtactaaaacctgtgaagcttcatcaatcggttgaaatgtagcaaacactataagcgttaaactaccatcttgaaattgaattggtttcgtaacattatatgaattgctgagggtacttgcattctcgaatcgtgttgctttagtaactactgttttttgcgtaccactttgaataaaagaaaatgaaggagagtaaataattactccttctttattttgaagataaagcatcgcattatttttttttgcgtattcatcaaaaagtggtatcgcatcttgaaacgtaagatttttagacttatcaatgatttcgtttatccctgtttgaagttgatctgttttatattgctcataaaacgtagggagaaagaagtataaagttaaataaatcaatactgcaaaggataataaaatgagagatgtagtcataaagagtttataagtaatttgcttcattttcatgagtttcacaatactattcatcaattttataaccaataccctttattgttttaatataagggatagctaattttttgcgtaggtttttaatatgtgtatcaattattcgtgtttctccaaaataatcgtaaccccagactttctctacgatattttctcttgtgagtacttttctctcattttgaaatagtagttgtagaatttcaaactcttttgtcgttaatataatttcaacgtcatttacatatactctatatgcatccacatcaatacgcacttctttaaatatcaaatgattatttacatttttatcataacttcttctaagtacagcttcgactcgtctaatcaaaacatgaaatgaaaagggctttgttatataatcatcgatcccaaggtcgaatcctttcatttgatcttcctcttcttccaacgcagttagcataataattggtacgtttgactgacttcgaatcattttagaaacttcaaacccattaagattgggcatcatgacatctagaagaattaaatcaaatgattgcttattaaattgtgtcataccctctagtccatctgaagcgactatcactgtataatgctgcgtcattaaaaattgtttaattaattcctgaatttcttgatcgtcctctaccacgagaatatgatagtttttcataatatcacctctggtagtcattatagccgtactatctggagtttatgtggagatacaataggaacttcataggacgtttaacgtattagcttcattttcaagaatgtgtattctccaaaaaaatatgattagccatattcctttttatgaaaaaataattgtatgcttgaaaaaacttatcgtatgaaaagctgaacgatttatatttctaaaaaaccaatgtataatattgggaactgcatgtgatttcttaaactgtgtgaacatatactttcgctacttactagaaggggaaacggaaatgaatttcaatataaaaaaagctagcgaaattatagagtgtacttcacaaactttagagttttttgctaatttagtaaacgattaaggtgtgaactaaggattatttaaatcatgcgagaaaggttgtgaaattatttgatgggttataaagcgatgctgtttgatttagatgatacattacttgatagggataaagcagtagaggcattatttttaattgttttagaaaagtgttatgaaaatgtagatggtgcggctaaaagcaacatgttacagaaattcaaagaatacgataaaagagaatatggcataagtaataaaacgacagttttagaatcattgtttgatgaattcacgccaaggtatagattgccacgcaattacatccaagatttttggaataataatttccctagatgtttttcaatagaccaaaatactattcatttcttaaatcaaataaagaagcgctttaaagttggaattataacaaatggctcaactcagaggcaaaaagctaaaatatttaacacgaatttaaataggtattttgaaacaatcattatttctgaagaagtgggatttagtaaacctgataaacgtatattcgaactagcattagataagctaaatttacaaccggaaaatactttatttgttggggatgacttagaaaaggatattgctggtcctcaaaatgcaaatataaaaggtgtgtggtttaaccctcagaaaatcaagaatactaccaaaatacaaccatatgccgagattaacactttggatagtttgttaagttatgttactccacaatatttttataacaagtaaaagtaattccatatatatattcaaaaatataaaaaaagagaaactatcattaatttcattgaccgtattagtaataaaaaatatgtatttacaacaaaaaatagaggctattttaatagctgaggctaatttaatctatgattaatacgaagttttgtaaaacaattttactcatactgtataaattataaaggggtgggactatggaaataaagaaagtagtaatcgatggaatcaatattgcggtcattaggaacgataaggtattaatatcggatgttcagtctgcattagatactatggcaacagttcaatatgaggtagatgcgaaacatattattatccataaatctttaataagtgaagatttctttgatctaaaaacacggcttgcgggcgatatccttcaaaagtttataaactacaaggtaaagattgctattgttggagatttctctatgtatactagtaaaagcttaaaggattttatttatgaatgtaataaaggaaaagatattttttacttagcaactgaacaacaagcaattgaaaaactaagtacattaaagtaataattatatcctgctaaattcccccatttcacttagttcatgattatatacgatatagaagaactgatgtttgtggtaaactaagagatgaataaagggggcgttttcttgaacaattttaatgatacgatccgagatttaaacaatatagtttacaaacctaacaatttaatgattacgaatctaaaagaagaaaagcaaaacgcagaatatgcaggatgtttattccacttaaataacaaaaccattcgttttagaaaatcaaaagttactcctaataaaattggtcaatttgtttctttttgggagaaagatgaaaatatgcgaaatagagctttctcttatgaagctgctcctgatttattagtaatcacttgtattgctgataataaactaggacaatttatttttcctaaagaggttcttcttaaagaaaaaatattgagaacacaaagtcaaacagggaaaatggcaatgagaatttatcctgtttgggataccactgttagcaatcaagctaaaaggagccaaacgtggcaacttcactattttgttgatttaagtgatagtaataatttgcctatagataaactattaaatttatattcgtagcttttgatttgcctcaaaaagaagtaattacagaaaagacatttgtaatgacgctttctattaatttacctcgtgaatcgtaatttttgtaccggtacagttaaatgaaatgtacattgttacagtgccccttaaaatttacaatcagcatatattatttaaacttataaatttttaaggggtgctaattatgacaagtttacaaaatcagcttttcacaagattaaatcttaaaaaacgtaatgaagtaacgtttgaagaattacctactatactcttttcatttgcacacactataccatttgagaatttagatgttatagcacgaaatacgaatcaaatctctctggaaaacttacgagagaaaattttaactagttcccgtggtggactttgctacgaattaaatactcttttttactatttcttaaaaaactgtggctatgatgtacaactggcattaggtacggtgtataaaaatgatataaatgcatgggcactggaggatggccatataacaattattttaacttatgataatctacagtatttaattgatgtaggtatagcttcgttagtacctcttgttcctgtaccttttactggcgagtctgtttcttcaaaaaatggttcgtaccgagtgagacgaaaagatacaagtaaaggaaattatgttttagaaagaatagatactgatggagaatggaaagtttgtcatgctttttataaacctaatattgatgagatagtaataaacgatgttcaaagaagagtgatagaagatgagaagtctatttttaataaaggaccaattgcagtaaagttgacgaactccggtcatatttcattaacgaatacaagtttaactgaagttattcatggggaaaaaactaagcgtgaaattacagaaaatcaatataaagagtttttatatactttatttgctattaagttatgaataataaagatagccggttcttattcagaagcggctatctttattattttggtgtaaatggttttcttctaatatgtttcggaaactgcggtatagttaatgtttttaatgtttcctccgcttcttcatatgtatgaaaaattggttcttttccatcatccccttgtaaaactagcccttcatctcgaattacatatggcataaaaccaccccatctagtaaagaattatgttcttttgcagcagaataatacgatttaaagtttgattttcttaatacatataatacactagaacagtacgaaaaagtatgtacaatgaattttgaatgtaaaggaagattattatgtcagttattgataaattgaaacttaataagtatacaaatatggtcgttattaacgaaccaagtgattatgacatttttacaggtaaagaaactgcattctcaaaagaacacgatgctatctttatatttgtagaaacgcttgatgaaatggtgaaacaaacgaattttattattagtaatgaagaattactaattgaaaaaggttacgtattcttcgcatatccgaaaaaaggtaatgctcgttatagtacgtttattcaccgtgatgagatgtttccggcattaaacgttggagaagatggttatgtgggagaaagcgacattaaatttgcacgaatggtaagtatggatgaagtctttactgttgtaggtttaaaacgcgagaagaaaaaaacaacgaaaacatctgctatgagtcaatgtgttgccgattatgcagatcgaattaaagatgttgaagcattattagctaatcatccgaatgaacttaagttttatcaaagtttaacgcctggatatcagaaagattgggcacgtaatcttttttctgtaaaacaagaaaaaacacgtgaaaaacgtctagagaaaatgatagagatcctttcacaaggctataaaacaattgaattattccgtaagaagaaaaaataatgattaagaaagtcacaatgctgcaacaattaattgtgatgagtacattgaaaaaagcattccttccattatactaaggaatgttcttatatttatataattagtaaaagagaaaaggtgtttgaaatgaaatcgtatattgtagttggatctggaattttaggagcgtctactgcttatcatcttgctaaggcaggtgcgaatgttactatcgtggatcgccaacaattaggacaagcaactgatgcaggagcaggtattgtatgtccatggctatcgcagcgtcgtaataaagcatggtataaaattgttaaaggcggtgcacgttactattcttcgttaattcagcaattagaagaagacggtgaaactgacacaggatataatcgtgtaggtgcaattagtttacatactgacgagaaaaagttagatcaaatggaagagcgagcttataaacgacgtgaagatgccccagagattggtgaaatcactcgcttatcagctgaagaaacaaaaaaattattcccagcattatcagacgaatatagttctgttcatattagtggtgctgcacgagtaaatggaagattattacgtaatgcattaataagtgctgcgaaaaaacatggtgcaactttcataaaaggcgatgccatattagtccgtgaaggaaatcatgttacgggagttacagtaaacgatgaaacaatcttagcggaaaaggttattgtaactgcaggcgcatgggcgaatgaaatcttgaatccattaggaattaatttcttagttacattccaaaaaggacaaattgttcatctgcaaatcgagaatacagcaacagaaaatatgccagttgttatgccaccgaacgatcaatatattttaacgtttgacaatgggcatgtcgtaattggtgcaacacatgagaatgatactggtttcgatcatcgtgtaacagcaggtggtttacatgaagtattccataaggcattagcagttgcacctggcttagaaaatgctacaatgcttgaaacgagagttggattcagaccattcacaccaggattcttacctgttatcggaccactacctaactttgaaggaattctcgttgcgaatggattaggagcttcgggtttaacagctggtccatacttaggagcggaacttgctaaattagcgctgggacaaccaattgagttagatttaaatgattatgatgttgctggcgcaattgaataatatagggtactgctaacatttaggaagaaccatgctaaacaaattcgacaaggaataagcagttttccctctgttaagagtaacctgtttatgaaaaataaaattctttaaaaatagaaggccgacattataaacctgcattaataatgtagaattgtgatgtcggctctttatttatatttatttaaaacttattttcgagaggagcttaagcaatgagagcgccatatcaagtattgatatttccttattaaatgaaccaatagtaaacaaaagtaccgtacatagtagatatatctactatgtacggtactaattttataacttcatgaagtaatcagttgaacaaatgggtgtcctgctacatcgccataaacttaacttaataggcatgggataacataattgaaaaaatattttaaattttctttattcatctagtgatctttggtaatatttaatttagagatgtaaagaaaagggaatctatattgcacatgcggaatatcttgaaatgattatttaattggatagagacagtagtggtccttgattcttaaggatgcgtttatttgtctatcttaaaatacatggtgtggacaattaaattcccattgctgagcagatacctttgtatatctgcttttatttatgggcaaaaatacatctctattcacacaatcatagagtccctaaattgggggattttaatcagaaatttaatgagaaatcagtacgaaaaagaagaagcactaacaggaggaaatgtctccagtgtatattgtttttgggatacggttcgacgagaattaaaacctgatagtattaaaattcatacattgctaaaacaccttgaaaacaaaggtttaaaacgtgtgccaaagtttctaggcatcgatgaataaggaagagagattcaattcattcgcgaacacggaaaagaatggatttaagagaaaagtcctggtgaattaatggattgtaagtgattaaaaagaaatgccaccctaaaattcttaagttgatggacatgcggctgtacccctgaaggaggactgatgtcgaaaagtctcgcgattgtcgtcatgggaggtcttattccatccacactgcatatattaatagtcgtatctattatttttgagttgatagaagtatggctacgagaagagagaaaaaccggagcgtcaccctatccgtctaactctataacattctgggaggatgtcacgttgataattgatttaattgtcgccaatttagtaatacctggcttgttgtcgttgtggatctggaaatcgcaaggatcgagcttggttgggaccgtaacttgtttgttgactactatgtcttatttcatattttactggctcggggattcctataaagctttgacaattttcggtttaatttggatgccatttatcattttcgcatcttatcgattaataaaaaaaacatatggaagtcctgtatttccacacgaaataggtaaattggcgactctaactatcattatcatgacctcttttatatttatttatttgaacatgactgccttacaatcaactttttataagaatcagaaggaaacagatcacttcatcttttacagctctaaagcggattattcagaggttgtaaagcttgctgataatttagaacagcattacgggcgtatcattggcttacttaaaacagagccaacgacgaagacaaaagtaacagttttttcaaatcaaatcaatctggtatattcgttggggctattttctaatttttggtcattaggcgtatttagcgatgaaaaactatttatcttatcaccgaaaaatcggtcttctatattaaattcaagcattcatgaatttacacatgtcgtactgtctcatattgacagtaaacgacctacgtggctggaagaaggagttgccaattatttagggaatacggatcttaatgtccaaaaagtgctcccaaccttggtttctgcggataaaatacctaactttgacgagataaatgggccagcattcgtgtatagaaacgggtatccatattcctatacgatcgtggaatttttggtaattaaatatggatatgagaaattaaacgacttcattcgacacccagaagaatataaccgaatatttggcgtcagcaaatcagaattacacagtctttgggttgattatttaaaagcgaattatagccactgatccaagattgtttgccgcacgcgtatctctctgattttcacctgtattatgatcgttctcgatgttttccactttccggtacttggtcctgctgttcatacaactatggatataaaaattattttatcaatatttataatgagctttctatactgttggatttatgcaggtttttgcagaataatgatgaatagattatataaagtgttgtattgacaatggcataatgaggattggagattgaattcatgactaacgttgcagttagaagaccgaatttgaatgatgtagatgaactatatttatttttccgtatagttattacgaatacatacaaagatgaaggattgtcacaattattagatgacatagaaaatgaaattaactcaaaaaagcagtatttgaaaagtgactttgatagtaacggagaaagtcgttactttttattagcaattgatacaagtaacgataaaatcattggaacaatcgaaatcggtccagcaagtacattgattaatagttgtacaggtggtgtacttaaaaatttgtatgaaataggaactgtattcatacttccggagtatcagagaaagggaatagggagtttattactacatacaatgtttcttacattacttagcagagggataacagaatattgtttagatagtggatataaaaatgcgcaaagtatatggatgaaaaagtttggaaaacctagctatgtattgaaagattactggggagaatccagtgatcatatgatttggaagaaaagtttacatgatacacctataatatttgaattataaaatgaaatatgcctctgaacatagcttttcttacttatgtatgctattatttatctttataataaaagaggacgtgaatgaacttgattaaaattaaaattcctgaagctgatgtttcaattactgaacgtaaacaagttattaaaggagacgagccaatcattactccaattaatggatttatcgatttccacttgttccctagagataaaggcggcatttttatgttttacaatattaatgacgaacttcttttcgtaggtaaagctcgtaaaattagacaacgtattaagaagcattttgaagataatgtttcaccaattaaaaatcaccgtgatgaagtataccgcattgatgcatgtatcgtagaagatccaacagaaagagaaatttacgaaacatatatcattaatgaatacaaagcgaaatataacgttgataaagtattctacaaataatcaacattaataaaaagcaatcctagctaatatgcaaggattgttttttatttagatttattcttcatatctttctccttttttcaaatgattagcagcaacaaaacagattacacctataaatataagtacaataccaaccgttttatgttttccctcaaagaaaggaatatctgaaataacatttgtcatacatagtcctaaaaatacaaggatagggcccacccaaagtaatacattaccgaattttgtgtgcttccacataataaccctccttaaccctctttacatatatatccataaataaaaagtaaattcatagagaaatatagtttttttcatatcgaaaatttaaccctcatatattggtacaagcaaaagagaaaggagaccatcatgaattggttagaagctttcatactaggtataattcaaggtttaacagaatttttaccaatcagtagtaccggacatctttatttaggaaggcatttgttccgattagatgaggctggcttatttttagatacgatgctgcatattgggactttacttgcggtttttatttattacaaaaaagaatttatatatttaattaaaaacccattttcaaagctcatgttattacttatcgttgggacaatacccgcagttgtaattggtttattgtttaaagacttctttgaagatatttcaaaaacaggaatcacgatcggttgggagtttttagtgaccggattctttctctacatggcagataaacaaaagaatggtcgtaaaaaaatggatgacataacatataaagacgcattaattatcggttcatttcaagctgctgctatttttccagccatttcccgttctggaatgacaattgtcgctgcattatggagaaaattagaccgtgaaactgctgcgtacttttcttttttactatcgacaccagccatcgttggagctatcattttgcaatttgtagacgtttttcaagggaaagcagaatctatttctagtacatctttaattgtcggaacgttatcagcagcgttttttggatacatagccgtttcatggatgattcaatatttaaaacgtcactccttaaaagtattcgcgtattacgtatggggattaggtattttaattttaatgttgcaatttactgatgtattttaagtataatgataaagaagttaattagtttaagatcctgtttcattcatacaaggcaggatctctttttattaagggggaaaatatgtttaataaggctatcgttattggtggaagtatggcaggaaagtttgcagcaaaagcattatcaacttcttttaaagaagtaatcattatagaagctggtgaaagatgggatggaaaatcttcgagaaaaagagttccacaaagtaatcatcctcacgtgttattaaaaggtggagaaaacgcaattgaagaattgtttcctaatattacgaacgaattaatagaagcgggtagtattataaacaactttacgcgtgatttgaaatggcatcaattcggtctatggaaacaaccgttcataggggaagtacatatgattcaacaaagtcgtcctttgctagaatggcatattcaaaaacgaatacatcaaatttcaaatattactattaaatatgaaacattggttaaagggttattggtagatgcaaagcttaacaaagtgtgtggagtaaaagttaaatatttagagacaaacacacaagaagaagttcatgcggatcttgtagttgatgcgagtggatttggctcaaaaagtatagagtggctacgagaatacgaaattaaagtacaagaagagaaagttcgtattgatttattttacgcaacgaaaatgttcaaacttaaagaaaatgaggagttagactgttgtaatatgctaatgtctcctagtttccctgataacccttatggcgttcttattcaaacgatagaagataatcgttattttgttacttttagtggatacgcaaatgagaaagcaccacaaacagatgatgagttttatgattttgctgaaaatctatcaatttctaatgttacagacttcttaaataaggctgagggaattactgatataaagacatacaaaattccttatcaagtacgccggcgatttgatttagtgaataatgtaccagaaggattattagttgttggagatgcgcaatgtcgttttgatcccgttttcggccaaggcgtatcagttgctgctatggaggctcaccaattgcaattacttttgcaagatagaaaacaacttgataaaacatttacacaacaattttataaaaaggcagctactataatagaaacgccttgggatatgacaacaacagaaatatcacgtcacccgcaactaaagagagaattaactacaaaacaaaaatttcagctatggtatacgaagcaaatatatcgactatccgcaagtaattctgatgtttatattcggttagtacgagtgatgaatttaattcgtagtccatttcatctctttcatccgaaagtgctactatctgtattacttaatcgaaagaaatagcaggaatataattgattaaaaaagaatgtataacagttagtaaatcaagaaggagaatatggaatggaaatatacatagagcaactaaagaaacaagatgctaaggatttatttacgtttgaacttacaaataaatctttttttgaaacaatggtaccaaatcgtggctcaaaatattttgaatttgaatatttccaaaaactactagacgatttattaatagaacaagcggatggagattcttatttttatttaattcgtaatgaagaaaaagaaattgtagggcgaatcaatttagtagatatagatacggaaactcgaattagttcgctcgggtatcgtgtcggagaaaaatttactaaaaaaggagttgcaacagcagccgtaaaattaattttagatgtagcggaaaataatgaaattactgaagttcatgctaaaacaacgactaataatctcgcatcacaaattgtactagaaaaaagcggattttcttcttatcaaaacgaatcagatataacatctgtagaattaaatggagaacatgtgaagtttgtacactatatttggagaaatacttcacacttataataaggaggacttattcatgaatgatttacgttatccaattggccaatttacatacaaacgtcctataactgaagaaatgattgatacatggattcaagaaattgaagatttacctaatgaactaacaaaggcaattaaagatttagatcagaagcagttagatacaccatatcgcgttggaggttggactgtacgtcaagtagttcatcacgtcgttgatagccatatgaatagctacatacgctttaaattagcactgacagaaaagaatccaactattaagccgtataaagaagagaaatgggcagagttacctgattcaaaattaccggtagatgtttcactagtaatgctagattcattacataaaagatgggttaatcttttatattctctagaaattgaagatttagaaaagacatttaaccatcctgaaactggtgaaacaaaacttgctgttgcaataggactatatgcatggcatggtcgtcaccataccgctcatattacttctttaagaaagcgtctaaattggtaacatggagattatattagaaaaggtgacagaaactgatgcagaagttatatttcaaatgcaaatagattcatttagctctttattacataaatataaagactatgaaacaaatccagcaaatgaaactattgaaaaaactatttttagaataaataatcccagcagtaatttttataaggtgataatagattcgaaacttgttggagcgatatgtatatccgcaaaagaactaccttataaattttggattagtccaatgtttattcatccaatctatcaagggaaaggaattgctcagaaggtacttattttaattgaagaaatgtttccagaagcacgaagttttgaacttgctacgattttagaagaagaaagaaattgttttctatacgagaaaatggggtataaaagaacagaagtaataaagaaattaaatgataaaactacacttgtttattacaaaaaagaaaggtaaagcatttaaaatacgctttacctttttatgttattttagattaaatatacaaaaacaatgtatgttcttccaaaatactcgggttagtaattttgaaaatgaataaagatacaaaaaccactactttgtcgtaaaggttactagcgctttttgaatgcttaaaatactatcgtcacctttaaattctttcgtaattggttcctccatactagacacccaaattttaagttctgcatctaaatcaaaatgcccagccgtttcgatgctatattgtgtaatacttttataaggaatagaatggtattctgtttttttgccagttactccttgtttatctactaatataagacgacgatttgtaaatacgattagatcacgaattaatttataagcatgctctactttttcatcgtctagcataatcttctctaaatcacgttctacattttcagaactcgtatttgatgcatttcctaaaataccgctaaataaacccatattaaattcctcctttaatatatgtggaatgaattacttatattgtaccatgttactcacaaagatattatcacattactttagtagtttctggttattgttgtaattagtttatataacctcatcttaaaatcttatgctaatatgaaattaagaaaaaagaagcagagggatatagaatgaagaatatcggtttagtattagagggcggaggaatgaaaggtttatatactgcaggtgtactcgaatatttcatggaaaagaacttattctttccatatgtagtcggcgtatcagctggagcctgtatgggagcaacctatttgtcgcgtcaacaagggagaaataagaaagtaaatacagagctagtatcagattacaggtatatatcttatcgaaatttaattcgaaaacgtgaattatttggaatggactttttatttgatgaagtacctaataaaattgttccatttgattttcaaactttcttaaactgtaatgaacaatttgttatagggacgactgattgcgaatcaggacaagctgtttattataataaaacagaacatggaaatgatattttaaaaatcatccgtgcatccagctctgtgccgtttatagcacctgctgtagaatatgataatcgaaaattactagatggaggaattatagatcctataccagttttaaaagctcaaactgatggttatgaaaagaacgttgtaattatgacaaagccagaaggatacgagaagcagcgaaataaattttctggtctagctaaaattctatatagaaaatatccgaaaatcgcagagaatttagtagaccattatcgtttttataacgagacgatatcttatatgaatcaagaagaacaaaaagataatttttttgtaattcaaccaagtgtacagcttcctataagcggaatagaaagaaataaggaaaagctcgttaatttatataatcttgggtatatcgatgctcaatatcattatgaaaacttattaaattggctagagaaataaaggagtggtaggtaaaaaggttatttttaatgaattgcagaacatgcctagtctactgtataaaccgtttccgaattgtgacattcgaaaaataagaaaagattttaataatacgtttacagaagatgattgtataagcgctgatttaaattattattggatgcatacagcaggtactttaagttacgtgtttaataataatgaacaggagattgtgtttaatcaaattaagtggctaagaaaatcgttttttgagtggtttccgcaatatcgttttctagaaacagagattataaattatcccattttatatagagatttcatgaattatgaaaaaacccgtaagctattactttattatcttactgaataaaaattaaaacgtacaagtgatgctgtttgtacgttttttgttcataaaatatacaatattaataccttgtccatgtaggtattttaacgagaaaaaagaagtacatataaaatatgtaagagggaggagatagaagcttgttagctgttttccttccaattcatgtccaactcaaatatttcgagtaaaattcgcttctaaatggtattatcaaatatcaagaaaactaatttagaaacgaagaagggacaggtttaatatgaaaaacgtatcaaatgtagataaagtagaatccatacagtctttacagtcaacaatccgtaaacttgaaaatgcactatctcagatgactcaaaaaggtgcaaatactacattagtgaaaaaaagactcaaagcagctagtatcggcttagctatgttagaaagtatttggaatcaagaaacccatcattacacccaagaggatttagcagacgctcgaaatgttctaattggtttgttgccatcaattgaaaagatttatgttaagtcaaagcttgggagtcctcaaagaacactgttagaaagaagaataaaatcattggaactttctattcaagcaattgatcatctttctaatcaataacttctctaaacacataacttacgactacttttatatagggattctaatgaaaaaattacatatagaatactacaaaggagaaagagaggtgatggagaaggtaccaataaagcgtctgtgttaaaaataggtatggacgtgcagtatagcagtcgttttccttcaaatgattatccatccggaaagattgaaacatattctttttatagttcgattttaaataacacacgtaaaattcatatttatacgcctcatgattattctcacacttcacatcttcaagaacttctcattgtatttgatgggaattcattcattcataaccttccaatcgcaaaaacacttaattatttaatttacaaaaatgaaatcccatcttgtattgctgttgctatagatcctgtcgatcgattagaagagctaacttataatgataaaatgaatgcatttttcaaggaggaattacttccgtgaattcaggcgaagtatcgtgtgcatcaagaaacaaaacatacaacaattgctggtttcagtcttggtggcttagcagctttttatgcaacacttcaaaatccacatgttttcggaaatgtgttgtcaatgtctggatccgtacattggaaaaaagatgattatgaaaatcaaatttaatcaatagattctaatgcgactcatctctattcttacatagcagtaggagaacttgaaaacaaacctcttttaacggctaatagacgtctgtataaagctttaaaagaaaaggaataccaaattacttatgaagagtttcaaggcgatcatggtagcgtgtggtggcgagaaaagctattcgaaggattaagggcattggaatttacaaaaacgacactaaaaaataaaaaggagagagaagctatgaatcaagaagaactagataaaaaactaaaaaagcaagagattttagtaaaagatgaaaaagtttggtcctatacgtatgaggatcatattagttctatcgttaaagaggcagaaaagaaagggtcatttgataatttacctggtaaaggtaaacctcttaatctcgataaagatctttcttacaatcctgaaaagcaactttatagaactttagcaaataatcatgttttgcctaggtggattgagctttcaaaagaaattgacgatttaaaagaaagactaaaagaaaatacaaatacggcagaagcagcggatttaattcgaactattaataaaaaggttttagaacataatttactttgtccaccaagtgcgcaaaaaacgagggtgaaaacggacttttaacaatttttcacgaagctatttcttgctatataattaagtaaggcattttcaattcattactaaagggaggcaaatgtgatgaagaatacgtatcaacttcaaattccgacagaactagagcagtatcgtagtattttagaagaaagtataaaaccgtatgttaaagtgtctggaacattagcagagacaacactttttgagagtaagtttggtggttatccgtatttacctatagatcaagagcatcctaaagactcaaatggacaacctatgatgctacttgcgcagttaaactttgaagaaattccgcatgttgaatatatgcctcaaaagggaatgttacagtttttcgtaagtgctgatgatgagctttatggagcagattttgatcatccaacaatccaaaaagactttcgaattatttatcattctacaattatagaagatttaaataaggtaattactgattttagttatttaaacactttagaattagaagactttatcatacctgaagcagcaaaactgaattttgagttagcttatcaaccagtaacaccaagagattatcgatttgaaatgatttttagtgataacattgattgggaagaaattgttgatgaagaaaataatacagaattaggcgaactgtatgatgatttatgtaaagatcaaggacataaaattggtggatatccatttttcacacagacagatccgagagaatgggaagaaaaataccagcaacatgacatattattgctgcaaattgatacagacgattcattaaatattatgtggggcgattctggggttgctaatttctttatacgtaaggaagagctgttaaatctagatttttccaatgtcatttacaattgggattgttactagaggatataaataaaataatagcaaacaaaaaatcttcctgaaggtgaggaggatttttttatgttaaaaataagcgttatgttaactaggataagaaacaatgagtgtaatgaaagtcaagcctaaataacagaaataacaacaaataatgtgaagttgtaaaacgtgtgcaaatagcaataaattcataaagtaaaacataaaatataattattaatttatattttgtatagaaataatttttctgtataaaaaatttcttgtcgatcaaaaatgtttttgattcgataattcttaattgattattgatttgaatttgctgtgatggatttatagcaaaataaatgataaaaactgtagaaattcgtttagataagattttgtgtaaatctcactaaaaatctctgtttcgtctcattaagtatagtttacttggtttttgatacccgatatcgctttgtccctataactgcctataatatatattatgttaactgtaaaaaagtaataaacttactaagttttagttgtgcttattatgatccccttttccaccgaattagtaatgtgtgattggttatgtatttattcgctttattagctattgataataatattttcggatataaattagattttaaataataaaaatacaattcgtttaatctgttcattttaaacgaattgtattatgatgacgaatatttttttataactagtttgctacagcgattgcttcgatttcaattaataagttatcgttaattaactttctaacttctacagctgaacttgctggtggattattagtgtcaatgtattgatctcgaatatttctcacaatggccatttgagaaatatctgttaaaaaaaatgttaatttgactacatcattaaattttaattccgaagtttccaatgcacttttaatattttcgaatacttgtcgcgtttgtgtagctaaatcgtcaattccaactatttgaccgtcagtgttaatcgctacttgtccagatatgtaaattgttcgtttagcgtttgtaacttcgactacatgcgagtatccaaaagttggtggcatcgtttctggattgataaatttcttttgcaaggctcttctcccctttaaacatttcattttcttaatgttaggttttgatttcagattatcctctatttactaataattatttatcgatttagctgctacatttgtaaaagtgtattagcactttaatttaaagttattgatggattatgtacgtttgattttttttgtgcttgttataattacaccttgttttattaattcttcagttacttttgtatagaaaaagtgataccaccagataaaaaactcttcataagtaatttcttttgagtatctgctgctggcaaagtattcttttaaagatttatcgttttcattaaacaataagactaaatctttactgatccaagatgaagcattacaagtaaatattgaagtttcgttccttttatttttatagatggcgaattatctccagagaaaatcattttagcttcataagctgtatgtaatatattctccggaatattattagtaaacacttcataacccctcccttactagtaaattcattgtaagatttatgtatttactaacttctataaacgaaaataagtatcctctaataatctcaaattaaaaaccttagcatagatatactaaggttttttgtatttttataatgaatgaattctttcatagtcttttttaaattgattatcattttttaaccaacttttaaaagttggttcctttatttctaaaatggaacaagttttagcgatacatttatttttcatatattccttaaggaaattttgttttctctgcttaacagcagattgggttctttttaggtttcgatcttttaattgatctagacttagactttctttctgaaattcttcatattttctatgcaaataaatatctttgtctttataaatccaatttgaaaatagttgtattgattttctcccggttaaaatgacgcgataatgtttattttgatttagtaaatcggctggtaaattgtgattttgtagtacctgatttaaagaattcataaagctatatgatcctcctacaaagcttactgtatacgtttcatacttgacgtaaccatccccatcaaaatatccacgaacaaaatgatgtaaatattcttctggtacaaaaggaaattcgatgttaaatgatttacatggcataattccgtgcatgttcataaggtcgtcttttattgttttgctattaatatttagcatatatacacctgtttttttgttttggtatagcggctgatttgtttttagttctttttttatatcttctaaaatataactttctttttgtgatatactgacgcattgattttctttttgtataacgccgtcagctgctataaatcctaaaatataagccatattatttgaccaagttttaaaataattttcttttatgtcatactttctcttccaattccctatagcgcgccttgggacgttgctgtctgataaaaccatacgaatataccttgcagacacattagcaagtgtagcgatctctgaggtgcttttcccctctgcatatagctgcgttatttcagattttgatagtttacattttgatttcttttttcgctctatgtgcacttacatcctctccttccttttaataatttgagacttatcttcttctataacatataacgaaacgtacgttctttgttgcttataagaagaaatttactaaattaaaaaagtttacatctacttaatattgattttatctgctgctacatggtttttattttgcatataagaataatgaatttgacaaatttatgaaaggtactgcatttaaggtgaaaggtaaaatgatttcgtttaaactacaaatagctacaataacaacatacgtatattgttaatcgtaaaaaggagaacgaatgaataagaaatatacaaaccaaattcatactgatatgagttttaaaccgaaagatattataagtttaatgacggattactttaaaatgaaatcaaagctgcgtcctataaaggatttgcctgttgttttatcaaataaagataatgaagcgttagagagtgttacatggtttggccattctgcttctcttttgaaaatagaaggtaaaaaactgttattagacccgatgtttggagatgcctcttccccatttcccttgtttaatagtaagcgttatagtggtgctttttctttagaacgtgatgaccttcaagaaattgatgcgattatcatttctcataatcactatgatcatttgaattacaaaagtattatgcagttaaaaaatcgcgcaaaacacttttatgttccaactggagttgcacaatatcttattaaatggggtgtttcacctagtaaaattagtgagcataattggtgggacgaaattacgtttgataatattaagttagtatgtgcgcctgcaaggcatttctctggacgtggtatgacagatagagatcgttcattatggtgttcatggcttattcttggtcaagagactaaaattttctttagtggtgatagcggttatgcccctcactttaaggaaattggtgataaatacggtccattcgatcttacattaatggaatgcgggcaatatgatccgaggtggtctgctattcatatgttgcctgaagaaacggtacaagctcatattgatgttaaaggagaattacttcttccgattcattggggtgcttttacgttagcattacacgaatggagtgacccgatagaacgtgttacgaaagaagctaaccgtttaggagttaaaattacaacgccacaaattggcgaatctattacgttaaaatctacagactatcctttatccgcttggtggaaggaaatttaattttaaaatataaaaagagcgaatcctcttataaagaattcgctcttttttctgtatttaaacttatttcactatattggatctcccactatctaatactctatttgctggtacactggacatttcaaccactgtattcatactcttatcagtcagttcaatgagttcgttttcatgttttattttatttaaatcccacaccattccatgaaattcattatgttgaccacttacctgtataatgctttttgttttatttgaaggctgtatttgaaggtttgtaaattgattcccactaatttcatttggcgtagttacttgactatccatataaatcatatttacacagtcttctaaagaaaagttcataaaacgattggcatttatccaagcttgtccggtgctcggttttttcgctactaatttcagtccagtttccattcctacaactttaatattttcgaagttaacaaacgaaatttcattttcttttccagcagagtataaagaaattccggtacctttattcgtttccgtccaattgataatatttatatcttttatttgtgttttgttccaagtgttataatatttatttttaccgtctaaataaataacttcagagttaaatttaggatcgtcaatagttatatacgctccttcaatggatgcgtttttctctagttctaaaactctaaagtttccctcaactacaaattgggatccataaccaaataataatttcacaccttttttaacaatgattggtgacgtgattttatactttttatcatcaagcaatacagttttaattttactagactctgctttattaatagcagattgtatttttattgaatcattttcccctttaaagttttctacatacaagttagtacttttagctgcatagtcttttttgttgtattgataaaaagcaaaaataattaaaactataccaatgagtaaaacaattattttcttcatcgtactcaccccatatcgattaatctatggcttttatattcaggttattattattttgctttgtatttcagattaccattgctgctttgtctattaatcccttcctctatccttaataagctcttactggcgatataagatgtactgctgcagattgctctcctgcttcaatcaatatcggtcgcatagaacctccaaaacttaaagtaatcgtttcttcttttattgctcttaaagcatcaaccataaaacgcccatcgaaagatatatttaattgtttttcaccttgaatcgcatctatttgttgcgtttcagatattttcccaatttgagaagcgtttgaagaaattttaattgtggattcgtttatgatttctaagttaacattgttattagcccattcacttgctaataaacttgatcggtctacaccttgtaatatcttttttctatctacgttaataatcgttttaaaatcatttggaataaggttagaaatattaggatatttcccttcaattagtcttgaatataatgtagttgttccgagcgtaaatataatatgactctctgaaaggtagatatatacgaattccgaattgctgttcattaattttagaagttcactaatggttgcgcttggcacaatacaatttgcttttacatctgaggaaagtaatgtttctcgtatcgctagtctatgtgagtcagttgcagcgcaaattaacttattattagataactctatatgcaccccagtaagaacaggtctagattcattttttgctaccgcaaagactgtttgtttaaatacttcaatcaattgctctgtctctaccttgatttctgcatgattgtctataagcggtacattcggaaactcatctgcaggaaatccatttaaacttaatgtgatttcttctgattgtatcttaatagtttgctcattcttactttttattgcgatatcacttggcattttctttattatttcaatgaaatactttgcaggtacaaccatagttcctacctttaaaatagttgcaatcttttcgtcttcaattgaaacaggaatgaatttttcaataaaaatatttgagttacttgcaattaaagtaattccagattgatctgcagttatttttataccagataatataggaattaaagattttgttgatattgctttgttgacttctgaaagtgcttgagtgaattgtttgtgattaacgataaactccatgtttcccccgccttacatgagataatatttttatgaagattgatgaacgattgttccgttaaaaaaataaggtactgtttctttcttttgtaataaatatagtaaatgttctggtatgcgtaaatacggtgctgctatatgtaattccatccaagtaatctcttcgatttcttttggccttgatatatatgtctccccgccgattatttcgcctagaaaattaaagaaaattgcatgatgatctctttcctcgaaaaaggcttcactgatagaacaaatcccgtttacgtttatgtgtaaccctgtttcttcttttacttctcgaattactgcttcttctaatgtttctcctagtttaactgcgccacctggtaatgtataataagaaccattttcccctttgttttttaccattaagatcttttcattagttttatcgtacaaaatcgcgtatgtaacattaacttttttcatatgtacctcctctattttaaataaaaggaattttctgtcttctattcattctaccattaactccttttaatatatataagttagttaagtcttgcctttaccgctattgttggagttaataagaataggctactgatataaaaaaagaacgtaccttaggaagattatccaaagtacgttcttgcagttttagtataaaaattgattcaattaatactgaaattaataataacctcgcccttattgcatttgtatttcaaatactaacgttaacaaattctatatactttttaaccgtttttctaaataataatgattatgtcctttcggatgatcttcacttactccaattactttatatccatgtttcttataaaaatcaggtgcttggaaactaaaagtatctaaattaattaacctacaccctttttcaattgcaaattcttcaataagctttattaacttgcttccgtaacctttatgcctatattcttcagaaacccatagaaactcaacgtgtacatggtgccaaaaagttattgctgttaccccacctactatttcttctttttcatttcttactatgaaactaaccttttctgaaggtgttttttcttcatctgcaagatatttttgattgtattcaattactttctctcttatgtaatcactatcttcttgtacccactgctgtactattttcattttaagtgtcacgctcctttttacttatctattcaattttataatgaaattgtcctgtctttaataagttcgtaaagaagcaaagttaatggaataaaaaagagccctaacatgaggactctttttaaaattaagctactttccgatgtaaatgttttagttcctttttcttttctacatttggtgggcggattaatattgaaataatgaaggaaataacacttaaaacaccgattataatgaaagttggttgaaatcccccgagtatcgctccaataaatgatcctgcaagcgcaccaaatccgaaaccttggtagacaatcccgtaatttgtactatggttttttaatccaaagaaatctccgacaatagctgggaatatagttatattaccgccgaagcaaaaggcgacacttgctacacaagcaaaatagattccgtaatttagcggaataaaacttaaagtaaagactgacaatcctataataataaacgttgcagagacaattttcattcggccgattttatctgataacgtcccaagaataattctacctactgtattaaaaattgcaatcatagcaacggcgtttgcagcggttgctgcgctaagtccaacgagttgtacaccgatatcttttaccatactgattaaatacaaaccacccatacacgaggtaaataacataaaaaatagcagatatacttgtttcgttcgcatcatttcacgcggagtatagtcattgtgcaatgtttcagttacagcattacttacaattgcctcacgtaagaagaacgatccgattaacactaaaagtaacacgataataccccaatataagaatgcttgtgatacaccaaggttatcgataaaatttccgtttatatatctaaagattaagctgcccattccatacgctgatacagatatacctgaaataagccctttccgatttggaaaccatttaattaaattagatagtgatgtaatataagctgttccatccgcataaccaacaacaacaccagctaataaatataatagtggtaaggaagaaacttgtgaactaagtattaagccgagtcctaaaacaattcctgcagtagcaataagtttccgaagtcctaattttttctgcaattttgctgcaaataaagttgagaatgataaagaaaaacttgttatagagaaagttatcgctactgaattaagattccatccaaacttacttacaaggggttgattaaataaactccatgtataaattgttccaaggccaatttgaacaatgattgtacctagaacaattagtaacggatttatagaagtttgtttcatactaactgtccccttcttttatcttgacatagattttcacagttagtatatccatcgtaaattgcaagatactgtacggaaaatggtaattaagttcatatacacaaaaagacacttcataaagaagtgtcttttgcaggttatatcagatgtttctaaagaaagctttgttaagataagccattttcgaatgcttatgtatatatgttatcaaataatttcttatatgtgatgagacttaagacgtatttttcattcatcatatagtcggatgaaaaattaatattcgatttcatcaaaatccttcggctgcggtacagtttgcatattagctgcatctttaggatcgctataaattgcattttgctctgtatttacatcttttatattttgttttttatttttgttcactttatctttcacttacaatcactcctttttgttataggagtaattatgccctattaccgttactaaatgtatcagcgactaaattactaaattcacgtaaataatataagtaattatcaccgccgtagttatatcttttgttatacatttttgcaacaactacattatattcaggtattactaaaatagtcggtccagtaatccctaatatttgatatgacccttttggaacacgttcaccaagttcgcttaattgtgcaggttcattttgaacgaaccaaaacaagccattttgtggtagctctttatttacatatgttggactctgcaaactcgtagcgatttttataacttcttttggaacaatttgcttaccgtttatcacaccttgatttaaatgaagattgccccaataagcaaattctctagctgagacaaacagatttttttcagtaccgtcatctaccgtaccaatttcactagtcgcgtcttcatttggattattaacaacgtcaactaaattttcatctcgctgaactctccaacctgtttcttgaaaattagcaggcttaaaaacacgctcctttaacaattcaggaaaacttttgttatatagctgataaataagacgtgtcatcattcttacattaatatctctatatgcccatgcttgtcccggttcaaattcacgaaaaattgtcccgtcattcatttcttctaatccgtgcgaatgtgttaccaaatgtcttatcgttgttttaccaagcaatgcaggattaaagtctttaaaatattttatcgcttcatcatcaatagagtttattttcccctcgtaaagcgcatacgctatcattaatcctaaataactttttctagcagaagcaacgttgaactgcgaagatgcggttacttttttattagtcgatgtatttgagtgataaccgctataatgctctaatacgactttattattttttataatacaaattgctgtagcagaactatgatttttttcttttatattctctacccaagaaatcaacttatcatatgtatacaaataaatcccccttaatacacatcaaaattacagtatgaaagaaaagtataaacagtatttacacctttctttcatataaaatattaatgatgtactatatttaaataatccaccagttccagcaattaaagcaaccaaaacatccggcacaacctacgcaaccaccacatctgccaccgccgcaaccgccacagcgtccaccacaacctccgcatccgccacaacgacgtgcatcgccttggatgtaataatatggatattggctttgttgttgatcccaatacacaacattaccagtttgataatcattaaggtttaatgtttgtaattcatgttgaaactgattcattacgaacccctccatttataaatataaatttcgcccaaacgttaaagtttatatatttttgtaaacaaaatagaaacaagactatagactaaatgcgtacatcaacaaaatatgaacttacactaggtgatgtaccttgtttttcagcctattttctttatatttattcgatggacgtatttactataaataaagtgatttaaaaattactaatccaacaatttagtagttcatcacttaactttctttctagtaattccttcactaaaggcattggcatgatttcataatgatttaaggcttctttattataatctattcagtgaaatgctaaatgagactcgctcgatttcggtgttaagtccgtatgtaaatcttgtgactctacttcaaaaatgtgattaatttcatgatggagcacttctttatcttgccattgattttctatgactcctaaaaattgttgtatactacagtttactccaagttcttctcttaactctcttattaatgcattctctactgattctccaatttcaacatggccaccaggtaaaaaataatgatggccaatatattcagcaactaataatttttcatcttttatcatgactgctcgtacaatatgatggaatttacttttcaattgatattcctcctagttattcaatgtatagttgctcaaaatagtcatttagtattggtataatataaatcataggtgtttcatacggatgcatatcattaataacttcaagagcatcttttacaagttctcgtttacactttatttcaactttacattcttgcccttcgcatattcgaccaatttctccattaaaaggagatgcctcgtctaaaggtctccaatatcctttcactgaactataggaaagacaatggtcatattcgcccgttttacatgctccaattttatttaattcatcccttaatgtttcaatatattcttcaggaatgaatacttcaattttcaattcagtaaattgcatatttcatttcacacctttacttcataatagttaaacaaataaacgatatacttgctcaccatcatactcctgtcctaatgatatgaaaccatatcgttcatatagtttctttgcagagatattatctttatgtactgttaatctaatttctttacacgatttaaaagtattttttattatattaatactttcttgtaatgctgcttttccataaccattaccttgctgcgattgatcaataataaatccgttaatccaatacatatctgatgtctctcttacaacagcatgcataacaaaaccaaccataaggtcaccatcgtatatagcgagtggtatgtactctacattgtcaccatctggttttatatatactttagcaagcgaaactgctacggatggaacaaatttcaactgattttctttaacttgtagttttaatgcttcttcccaattttctctcgtaacaacctttaactggacattcaatattgtaagctcccttatatagaggatgtatgtttatattcaacgtagcgaaataattccctttttcgacaacgacttataacataatttttataaaatcttgaatgaatttttctgcatctatttctaaagctatacgggctccttcagatttagagttagggcgaaaatcagcaaatgtttgtcctttcgtatctccgtatgtatctacattcactgtacgatgcgcaaattcaaaaaaactttggttaactaatccacttatagcaaccacatcatgaagcaatggcccttcgatagatggattaagtttttggtatgcagaaaaatagtaatcatacattggtttcattatcgtatggaatggattctttgaattagcttgaatatagtcaaacacatttggtgttaacacagctttgtttgttacatttaaagggaatatgaataaattctttgcttgatggaaaacaattttacttgctataggatctccatacacatttgcctctgctaacggcgtaacgtttcctacttctaaaaaaacaccacccatgaaatagattccttttacatttagcattaaatcattccataaattaaaagcaattgctaacgaggtagatcttcctacatcaacaattgtcaaatcttttccgtactttataagaatcgcagcaatactgccgaaattatatattggaatagataatacattttctggaacatggataggccctaatccttctgctccgtgaatttcaggatagtacgtagtaatttcttctgtaagtggttttgttgcaccactaatgacaggaatgtcttgtctatttgctaactgcaaaatatacgttgcattatgtgcagcatgtatatgctcaacatttccgtatccagttacaataccgacaatttcaatttcgggatgcagtaagccatacataatggcaaatgagtcatcaatacctgggtctccgaaaaataatactttttccaagaaatacgctcctctcacgaaaaaattgagtcattagtaactatgtatatgaaaaaagcaagtatatctatgcaaattttagaatggataatgttttacaaaatattaaaaaggaactagcgtatgctaattcctttcttgagtaaccattctcaaatttaattaattatcgtatccttcataaattgcatcatttatttgattttgtatttttgtatcatcaggtacaggtttccaccaatttcctgtaataaataacatagttaataaattataactatcactaaaataactttctctcttattcttcatccaatcccaaccgctatttacccacttttgattattgctacttgttatacttgcagcaataaacggtgaaacaaatacagcagttgaataactaccaatattagatccatttaattgataaccatccacaattttagaaggatttccattcgttttattttgaatccacgaagaaactttatcagaaatgactttacttcttttctcgccgtacatcgcatagtccattacaattctcaatggtacccgactagcattgtaataatatgcatttgtatattctgactcatctaagaagtctttaggtgcgggttgtggtgggttttttacaacgaaatctgaaataagtcctgtatttggagagtatgtattactaaattgcgtataaacatcgtacaaattattaataacagtaagccaagttttatcacctgtaaattcataaaatgctctaaggtgtgacatcatccaatcagatggtctcgtatcaagtgaacttttagaatcccaatctcctaaatttagtcggttattatttgtaacattactagctttaataccttttgtaatcatgtcttgtgcttctttcaaataattaactgttccattagatccccactgcttatgagcaagaagaagagaatacgcaatatctaaatctccatcagtagcagaatcaaaatgaccttgtgcttttttactatctgcgacaacccatcccattaaattaggattttgagaacttttaaaagttcttgctgttttaaataaaccgtcatagattttttgagcattcgaatcataaccagccattaatactgtaattatcatcccatacccttgaccttctgaagttccaagtggcttaaacccatctgcatcacctgtaatctctccttttatgtaataaccaccaggtaaagaagataaatcatttttcaaatatttctttttccaattatcgtagtaacttcttacagaagcatttaaactttcctgtgtaacatgattcggttttataacacctgcataattaacttgctgcggaaatggtttcatttcctttgcagcagctacttgttgattaactacgggaatagaattttgtactgaattgtccgttacacttgctgcgaaactagaattagaaaaactagctagtccgattcctacaatagaaatacatgtgaaaatttttctttttccattcattatgttgtcagctccttttaaaatgcttactacataaaatgtaacatacaatatttaactgaaatacaaaatattatatttatcaacataagaaagaaactatataaaaaagtatcataaaatcattattgaattacattatacggattgattatttactaaattcctatgtttttcttttcttaatactggtatatgagcaatcacaattccaagtatagtaattccaccgccaattattgaaactaaagttggcacttctcctaaccatatccaagcaatgaaacacgcagttattggcgttaaatatagagaacttgttgcttcagaagcaccagcacgagatataatataggccaatgcaatatacgggagtactgttggaaagacacctaaatatataacactcaagttaacttcaagaggagctgctaatatttcttgataaactccgggtaagaaaataagcatacatacagtactagaaaaaattgtatatatggtaaatggtaagaaaccgtatttttttaagtaagatgtttggaaaacgaaaaatagactttctgaaatcgccgctaataatataaataatcccccgctatttaattgaatagcgtcgccttggctaaatgaaattaaggcaattcctgcaaaactcattacaccaccgatccagccatttaatttcattttttcattcaaaaaaacagaagcaaaaattgccgtcactattggagtgactgaaattattaaacttgcagatccagcattgactgttttttcgccgtaatttaatgcgatgtgataaatagtaaaccctaaagcaccaaatataaaaaatgctgggatatcctttaaatccggtaatcgtagtttgtatataaatgaaaataacaaaagtataaatgaggcgattaataagcgtagtaaagtaaggtgttcaggcgtataagattcaagccccagacgaattgctggaaaagcagttccccatataagaattgtaaaagcatgagcacatataatgcgtaaatcccattttttattatgcatgttttctctccctccttaataaaccaaccatttttaaattaccaattatttcttttcatcatatttaatagttgatacaatgtcttcaaccagttatttatcggaaaaaccaaccactttgaatcttttaaattaacgaaggagttttttatatgacaaccgataaaaaagtgcccaaatatcggcagataatagactatatgaaagaaaaaattgaaaacggagaatggccaattggaagtaaaatccctagtcagcggcagttagcaaaattatttcatgtaaatcgaagtactgtaataactgcgctagatgaacttatggcagatggtttaattcaaggacaaatcggagcaggaacaattgtaacaaataatacatggtcattattagcaactaatcccccgcctgattggagtgaatatgtaaaggccggtattcataaaccaagtaagttaatggtgcgagaaataaatgaagcagaagcaaataaaacgcttatccatcttagtaaaggtgaacttgcacctcatctttttccgctcgaaactatgcaatctataataaaaaacgtcagtgaggaattagattatttcggatacgaagaacaaaaaggtttttatccgttacgtgaagcaataagcaaatacgtaaaatcatttggaatacatgcatcaccgggttctatattaatagtctcgggtgcactccaagcattacaattaatatcaattggtcttttacatagaaaatcaactgttttacttgaacaaccttcttacttatattcacttcatgtttttcaatcagcaaatataaacttatccggtatatcaatggatcatcacggtattttacctaacgacttgttaaaacgaattaaatatagtcaaaagaataatattttatattcaatcccttgttttcaaaatccaacggggatattgatgtccaaagagcgaagaaaagaaatattaaaaatatgtaaaaaagagcagttgcctatcatcgaggatgatatttaccgagagttatggattgatgaatcacctccagctcctttaaagtcaatagataaacatggacatgtattatatattggtagtctctctaaaacacttagccctggacttagaattggatggataattggaccagaacctgttattgatagattgtcagatataaaaatgcaaacagactatggatcaagctctttatctcaaagagtagctgctgaatggataaatgaaggtttttatgaagaacatgtagcaaacgtaagaatgcacctgaaaaaacgaagacaaataatgatacgagctttaaataaatattgtgcagatattgcatcgtgggatattcctagtggtggagtttttatatggctaaaggttgtacataacattccgatgaaaaaactattttcagaggcactatcaaaaggaattcttttaaacccgggacgtatttatgaagaagaatcagatcagtacattcgtttatcatatggatatgcttctccagaacaaatgactaacggaattaaattgctcagtgaattaattcggaagttaacggcataaaaaaatcctcttttgtttttggaggattttttcacgtattttatttaccacaatttcatttcctgccctaataaaataagttcttcataaggatctccgtcaatatttaatacttgagcaaaagcaggttctgtttttaaaccttgttcctttaagtgaataacttcttcccttatatgaggatgctgcattaataacatgtgctccactatcatatgtctatatgcattttgattacgcactggcttaggttgagcaaataattcaaattcaaaaccttcgaattcaaaattcacctttatcgattcagtacctttcatttttttcttttttatgttgaaccctctataagaaccatataaagatctcatttcttgctcaaaaacatcaaagttatatacttccattacaatatctaagtcagattgaggagtatcaattcttatcgggattgtcccgcaaagaacgggattatataaagctaaatcctccataatatttagtttgttcaaaacatcatataccttttgttgcttgtcattccctgattgtaaatatgtaatagatgtaaacatggaagtctctccttcatttcacgtaatacgtgtctcactaaactcaagaaaaatttgtccgtttaaacttgttctagaagtacctttatttcaatatattaaggcgaataaacaatatgtttcaacttttctcctatactgcaatactataaaaataaaaaaaggaggaattattatgagcattttcaacgttcttttagccatccacatattatttggaacgatatgtttaatcaccggtattgtagcgatggttgctcaaaagaagaaaggaaaacatacggaatggggtgaaatatatcatgcatcctatgttgtgatcaccgttactgccattatattatccgttataaactgggataaaatcgcatatttattttatgtagcaattttctcttattcatttgcgatttatggatacctcgcacgaaaaaaacgttggaagaattggcttcaccaccatattagaggtatgttaggctcttatatcggtgctgttactgcacttttagtaaatgtcggtattcatattcccttaattaatttacttccgcctatatggttttggtttttacctacattaatcggtattcctctcgtagccagtgtatcaaaaaaatataaaaagcgtagttaaacttcattacattttcgttactttctgatgattattatgaaaaatcatactcaatgtaatattttttttataaattcaagatcgtattgctttaagttagtcacttagcgctaaataagaagaatccaataacagtattggattctttttcaaatttcatttcaatatcggctttatgcattcaatgatgttaccatttggaccaaaaaccatctttgtatacttgtgggtacttgttttattggttcagtgataattacaccattatagtttaagattgtaataacgaatgtaaacgatccgggtaattcgtaaacatcccatcaacgccccataaaagtaactttttcatatctttttcattatctacagtaaatggatgaacttctaatccgtgcttctttattctctttacataagcggaatcaatatatttatagttcatcccaagaccgatgcagtatgttttatacttttttatctctaattcagttaattgaactgactttttgtaaggtagtaattgtactagcggtaaagtaacatctaaactatgaattttttgcagactttcttcactaaatgattgaataataacgttatcacttatttcgtagtgctgtataatttctaatagcttctcttccataccagcgtattcatctggtgattttgtttcaatataatagtttgcaccattcccgaacgtttcaataatttcttctagtgttgggactttagcatcttcaaagtctttctttgctaaacttggatgcttttcattgaaaaaagaacctgcattaagtttctttatttcttctaatgtatgttccttaactagacccgtaccatttgtagtgcggtttactgtttcatcatgcatagctactaaatgtccgtcttttgtcatttgaagatcaatttctatataatctccttttaattgttgtcctaatttatacgctgctattgtatgttccggcgcatacgcagaagcgcctctatgtgcaatgttttttatatgatttgcttgattaatagctttcgtgtacttacgttcatctactttatgtaaaacgaaagtacctagtaatataatggtgcaaatgattgtaatgatatatatctttttcataatgatgtattaactcctacatgaaagcaatttggatcgaataatttattcaattaaatgtcgattttcaaatacagtcatttgtccaacagattgaaaaccagcctttttataaatattaatcccatcaggtgaagcttgtaatacgcattgagaaactttcaattgttttgcttcttgcagcaagtaattaaacatagtggagccaaatccttgccctcgcattttttctttagttgctatatcataaataccaatactatcttttgtacatactaatgaaccaacagatacgacttcatctttaaaaatccctaaatatagtttcatattttcactattccataaatcgaaagaagcagtttcattataaaatgtttgcacatgtataccttcctctgatgtaccaaatagattagctaacgtttccccaaactttttaatttgtcctaacgaagatgctctttgtatcgtaaaaccttctggcatttttattgttggttgaattgtctttaagtctgctaccatcgcaatattttgttctgcttcttttaagccaagttttattaattcgttttttatagcctgttcatagctattatcccaaaaccaaacacacattggaaacttctttttattatagttgtttatcactttatataatttctcaatgtcttccgttacatcattgtttagtaaagtaatgatattaaatgtatctgcaggtaaaccacaatctacagcaatgtagtccttcgtttcttttacattcatttcatgtacatgacgcgcaatatatgacattttatatgtgaagttatctattaataactgtttataattcattcttttttctcctttcataaaaattcgtattcaaatcgttcagtattaaatataacatatacgaaatgtaactatttctataaaaatatctctataaatcactctatacgctctgaaagaattaaaaatgatataacgttgtcggaatgaaaaaagtggtatataataaatattaacattactagtaattattttaggtattcctagaataaagacctgcggtagtatgtcaactgaaaaacaaaagaatttttagttatcaaaggaaaacatcctattttttcttattcccccttttcgaggggatgggcaaaaacacccgagtagcaatctctgctggatccttttttaacagcaaagaaggtgcaaacggaaagtcaggaagcttacttgtccaataatcttttgctgttttatattcttcgctttgttccatttcatcatagataaacatataatcttgaaaatcaaaagataaagattctaatttttgatttggtttataataataatgcaacaaatcctgtccaacaatgttcatgcttgctccgtccattaataaagcatcgtatcgaaaacataataaatacgtgtcttcttttaaaagaaaagctttcaattcaaacaaaggccattgccccaaagggaatacatggttagtcattcgagaacgctcttcttgtaagcgagcatgttgattcctatcatctaaatctatgagactcactatttcaatctcgtaatcaggaacgctttgtaatatttgctgttttccctctggtaaaattacagctcgcaacattggatgacgatgaattaccttttgaaaactttttgaaagacgattgatatccaatgctgtttcatattcaaaatatgtttgaggtgaaataccgcttaattcaaactgtgaattccgtcctatcatatacgctgtctgaacttctgttaaggaaaatggcttagacaaatctttaacatgagttggtctactttcaaggttttcctctttatgctctaactttacacaagaactcaattgagcgattgtggggtgcttaaaaaaatctgttgtacttatttttaagcagtcttttcttaataaattaattacctgaagtgctttaatagattctccttttaatgcaaaaaaattatcatgaataccgattccctcaatctccataactttttcccatgcacgcactaatttttgttcaatttcattgcgcggagcaacgtatggaattgatacataatccgtttgtgttatatccaacaatctttttctatccacttttccatttggattcaatggaatctcttctacctgaatcattttttcaggaatcataaactcaggtaatttatcacttaaatattttctgatttcaccaaaagacaccttgttatccgatacatagtaggcagctaataatttcctatttccatatacttgatcaacaacgatagcctggtttatttctggatattcccttaattgagtttcgatttctcttaattcaatccgatacccccgaattttcacttgatgatccattctacctaaatattcaagttctccattaggcaaccaacgaacgagatcacctgtatgatacatcatttcccctgccgcaaaaggactcggtacaaatttttcatctgtcagtttatttttaccaagataccctcgtgctaccgctacgccagcaatgcagagttcaccaggaattccaaatggttttaattggccatacttattcaatatataggaatgataattcgggttaggtttgccaatcgtaacttctttggaagtgctcaagtcttttactgttgcgcaaatggttgtttctgtgggaccataaatatttaaaattgttgcttcactgatacaacgaattttttcaaccaaatcaatggaaaatgattctcctgctaataaaatagattttaaatcttttagaaaaatcgccccttctggatcactcaaaatcacttccattcgcgatggcgttgattcccataaatccaccttatgttttttgaccaaatgagacaattcttttgttgcaaactggtcctctgtagcaattactacttttgaaccttgcgttaaaggaagacatatttctaacaaggaaatatcaaaagatacactagcaagaaacaagaatgattgattagcttttactttttctctcattacatttaaaaaatgaactagcgatttttgttctatcattaccccttttggatttcctgtcgatcctgatgtgtaaataacataagctaaatcattaggattatgttctcgaactaaattactttcttcaccttgaaaaagatattctttatcaagatacagtacttcacctgcaaattgtggcaatacttcctctgttcgcttactaagtaaatattttgcttgactatcttgtaacatatattcaattcgttcagttgggtagttagggtcgattggtaaatacgctgctcctgcttttaaaatccccatcataccaataatcatttctaatgaccgatctaccataacaccaataatactttcttttgaaacacctttactttgaagaatagaagccaattgattcgctttcttattcaattctctatatgtcaaagattgatcattacaaacaacagcaatttgatctggagtttttaatacttgcgcttcaaacaaatcttgaaatgattgaaacaagtctatgcccgtttgaaaagtattcaatccttctaacaactctttttcttcttctgcaataatacaaatatctttcaatgccaaattcggattttgtgaaacttgctttaaaacataacaatacgaattggcaaactgttgcaaagaagagaatgaacgggacttgcaagaaatttgaaattcaaattcattatgtatttcattccattttcttcgtatccatagggctaaattattctctgcgtattcttctagcgaattttcattatgtaatccttccatcccgattacaatttgaaaaggagttaaattgtgtttaactaataattcagagagcggatactcctgattttcatacccgaataaagtcgtttgttcaatctcatttactaattgtttaaaggtgtgatgcggctggatttcacttcctaaaggaatcaacttattaagattctcactttgttcaagattcttttcaattataggaataccaatagtaattctttcttgatctgtataatgtgccaaacaaacccttaaagcggcttgaaaccagctaaataataataaatcttgagacttacttattttttgtatacttttactaaattctacattcactatgacttgaacgtattcacaaggtgtttctttatttagttggtaatcgctattaaatttaaatacagaaaaatcgagaacctcggaagataattgctccttccaaaacgcttctacttctttattttcatgaatcgaacttcgatctttaatgtgcatttttatctttatccccctaatattcatttcttctactcgttaattttcaagccaacttcaagcccatggagaaacacttgatgactatccaaacataaaaattgctgaatatcttcaaatttcatatgaccaactgaacaaacccctaaatttaatgtctcagcaaccatatttaaggtagcagtgataatgcctgactcaatacaagcaaataaatatccatctgaaccgtatttcgggatggaagcgttcgcattataaaccaaataaactgagaaggcagattgagtaaataaatcctgattaattaactcatgatcacttttgattacttgatcaatgttgtttacaatcacaagactattttttgatgggttataataataaaatccagctttcatatcctctatacgttttggttttacataaacaaagatatcaatgggatagagcccccctgcacttgcgtaatgatagtatattttttcttccctaacctgttttagagttgataagaatcgggaaaattccgaaaaactaatatgtttttccatatcaaattgacgacaagacctacgttccttgattatagtaggtagctcatttgttgtttcaagttgaatttcggtcgaccgtgcagcaacgtgcgtgcgatttaattgttcactcatatacttatctaacttttctttagaaaagcgaatctggttgctatatggatttgaaaaaatcttttcttgtgaagaaaatacttctcttgggtgtaatatgttacttactaacacacgattttttatcatgagctctatgtttttgtgtgtctcttctacatttcctaatgaaaagcgctctactagttcactgattttcacacctttttgagccataaaataaaaatcaggaaaccactcagacagaatacctgtaaatctcatttccccgatcaaaacttcattatgcaacttctcccaatgcttaatcggagaccagtaataaattttctcgctcatataaccctccataaacgtttaacttatttttgaaatgcaattttctaatttacaaaaattttttcggattctgctccttgtctcatagtgattataaatacatgcactttaacgaaacttgaaaataatgaaataactttttcttcattaaaattttttatttcatcataaaaaatgatttctttttggatatttcacatcctttcccatagtaatcctataaggtataaaccatttataacattgagaatattcatgtatttccaatgtgaaattattgtaatggattggagagcggttgaatatagttattaaatcaaataatgttgagaaagttttatttattatatcgataaaattttatgatgtaatttattacaaatagattaagaaaagagttttaaatttttcttaatcagttagtgtgaaaatatcacatactattacatacaatcgagttacttacatttcatatttaaaatagagaaaagacaccttgaatggtgtcttttctctattttaattccatatactttttacgcctttgttatttttaaacgatttgtaggaattaatacaactctaacatctagttcgttatatgttcgaatatataataaacattatataaattacgaatgtatttcaggtaattttataaataaactcaaagatatcttctcctcctactgtcacaaaagaaataatctattgcttatttcttttattaaattgtaatataattacagtatatgaaattatattacattaactttaaaagcgaagtgagaataatcttcacttcgcttttttcatttgcaatccttattaaatttgctcaatgcagtatttatttccacattcttcgtttttatttaatcggtttctctgtttttaagacaaatgaacttaatgcaggaactttaattttattgtcatggacaacataaagtggtttacttcccgcctgcttgccgtctactagtactttccaaggccctttcgatggaagtgttatttcaacagcttctctatttgcattgtgagccactgtaaagtattcatttttattcccctctattgtataagctacagtatttttcggagcatcaataaatgatacatgtgtttttatttgctctgcagatgtcattcgaaaagctgagtactttttgcgtaattctattaaacccttcatataatctacttcattattaaacgttgcacggcgcagccaatccatctggttaattgaatctggagatttgtaactattataatcaccgtatttcgtccgcataaactcttgccctgcatgtaaaaatggaatcccttgtgatgttaataaaattgaagaagacaatttgtgcatttgttttcgcatttcttcactgtcacctggattagttaactcaagtttatcccataatgtatgattgtcatgtgcttccacataagttaatacctgttcaggatcttgataggtagacgaatttgtatcatagtcaatacctgctgtaatgccttttttaatacgatcttccatgttttgctttccatttacaaaaccattttccttttcctcaaatacactacctttcaacccatcacgtatattatcgttaaaatgagcaatccctttcattttctctgcatttttttgatttgctttcaactcagctgcaagaggtgtatttaaatcccatccttctccgtgtagtataatagaagggtcaatttgattaacagctttacgtatttcattcatcgtttcataatcatgaatacccattaaatcaaaacggaatccatctaaattgtattcttttgcccaatatgttacggaatctatcataaatttcctcatcatttttctttctgaagcagtatcatttcctactccagttccatttgcaaatgttccatcttcattgtaacgataataataacctggaactaacttatgaaaattagattcagcagcattatacatatggttatatactacatccatcactactcgaagattattatcatgtagtgtttgaaccatttgctttaattcagttattcgaacagttggctcataaggatttgtagaataggagccttctggaacgttgaaatttttaggatcatatccccagttatattgcggttcatttaaagtctcttcatttactgaagcataatcaaatatcggtaaaaactgaacgtgagtaacaccaaggtcctttatatgatcaagtcctgtttttacacctcctggcccttttgttcctttttctgttacacctaaatacttccctttctgtttaataccactttcaggttgaatggaaagatcgcgtacatgtaactcataaataatagcatcttccggatttttaaattttggctttttgtttgctttccattttttcggatttgtttcttctaaattaacgactgcacctttatcgccatttacagaagcagcacgcacatatggatcaaccgcttcagcccacttatcaccaattttgaccttatacgtataaaagagccctttttggttcccctttagttctgctgtccaagttcccttttcaccttgttgcatgtttatttcagcacctattttatcgttccagtttttatatgtaactaacttcgcttcgcttgcagtaggagcccataaacggaactttgtatgttgcggagtatatgtatttcctaaatcgttgccaccataataaaataaattatcaaattcttcgctacgaatgactttaccaatttcagtattcgtatcagctaagttttcaattttaactttgtatgtttgttttaaatcaattttctgttccgtaattattttaacctgattagtaatatctccactgtttgtatcataaggagtaatatttttaattttaatgccttcaatttcaattttcttttccttaatatgaaacgggacattagtcgttacagtaatttcattgaaactatcaatagttgctttttgaattgagagatccgatgaaggcttagagttatatactttttcatcacccgaaagaatccatacttcagcacgaccgtcctttatattttcaatccaacgatccccaccatctttttcccattcatttgttcgaactataaatcctacacgattatagtcaccgtctatttttatcttagcgtattttccaaattcatcttcaccagtaaattcataagatgtaccatttgcattttctccccataaccaaagattccagtcttttgtatttccaagcttttctttgtaatgaatgataatttcagttgttttcgaatttgaaactgccttcacactctgaaaagagaaaacagatgataacataatgattaaagtaagtaataaaactgttttgttaattaatctttttgtaatttgcaccacatacaccctttcttcaaatattactaacgatttattatgctttcactgaataaaactgcttaaatttatctagaaatctctttaacttcacctccatattggctattttcacgtatgtatttcaatgaccttttaatacgaaagcgtttgcattaacgcttaaaaaaatagatttgtttatgccttcatatatttgtaaatactaaaagatcagggaaatcattttaaagcaatcgtttgttatcgctttcattttatagactttctatcaagaggtcaatatattattaattttctgtttttatacactttaaaccttattgatttgtcactacttcttaaagagaaagcgcctcattattgcttagtcagtttattttcaataatacattgctatgaaaaaaacagctaatatccttaaaatgacattagctgtttttcataatgtattaatatatgaatgagaactatatttctaaattacttaatttttgctgcatcaaatgctttttgaactgcttgaacttcagctgtattcgcaccatatttattagttgccactcgaatacatgctgatctcaattctttgaaattagaagtcatgtttaactcatctgtatttgcataatagaaaatatcaaacattttatcttcaccaattcctttaacagttactccgttatgagttccgcctttcgcaatgagatacgcaactttattaataatacttgaattaaaatgaacaccgccttgatcccatccattaaaatcgttaaattcactgtaatcatctggataaggtactccaagtgaagatggaacagaagctgggttttccatatcacggaaaacagatcccgtttgttctcccattgtccagttgaattttccattatttacgtatttctcaatagatgttcccataatatcagataatgcctcattaatcgcaccggattctccgtaatattcaagattagattcgctagaagtaacagcgtgtgtaaattcatgtccagctacgtcatatgctttaacaataggatcgccatatacaagcatacttccattattagcacttaatgcattctgccaatttttcggatcattcgtctcttcagaatcccaagcgtgtacaactgaaactactttttgtcctttattatcaaagctattacgcttgtatttatctttataaaaatcaaatacttttgttgctaagtaatgagcacttactgctttcggatcgttaaatgttgccgaagtactagtcgctaatgtaccaggataatagctttcttctttagtaatatctctgtaattcacatcatatgtttcaatgccttgccctcttgtataatcagcaagagcatatttgccattactttgtttagagataccaaatgaacgagaaatacccaaatcatcttttcctgttccagttaatgatgtaagactgctttgtttacttttctttaaagctccaactagtttgtcactggcttttaagttagattcttgtaccatattttttaacatatcaccattttgtgcatttactaaataagtaccagaaacatagtttggtgttgcagcttcaaaggtaacttggtatgcatttttagcttgtccattattttcatcaacaaaaataacctctttaacttctggctcagaaataaacttgagatcgttcccgtacttcgtataaataaattgttttgcttcatcttttgatagattaataggttttttcaattcttcttgttttaaattttgtgcgctatcacctgaaacacttttaataacaccattattatctacgtgtgcagttaattgatggccatatacttcttttccttcgtatgtttgttgcatacgcacaagtgtagttccatcatacgaaccacgtttttgaagaactttataatctactcctgcttctccattgacttgtttttgggacagagcttgctctgttttctccttaagtgcatcctttactacattttctggtgccttttgtgacggttgtgtaagttcacccgaacggaacgattcctcttgaatttggacttgtagttgatctgtttcctctgcatgacctacgccatatggtgccacagctgttaaagctaatcctgttgttaatgctaccttagttaatgtctttttgtttttcattatttcacctcgtataatttttgaaatagaaagcttgtacaaagtatactgtctatttttgtcggaaaaaagagaaaatacgaaatttatgtaacattatgcaaaattacataaattgtggtcaatattataaataatgaacggaacacatatgtacattaatttgaataaaagagaatccttataaacgctcatccaattggttagttattaattatctatattcattctaataaaagtatacttacatctaaataacaacataaaaacccactctttactattgtaagagtgggtttaatgctattaaaataacaattactataagaaaccttataatttatatttttttagtaatcctattaagttttttataaaattcaccttttgtctttacatgattaaactcatttggattaatatttgctttttgtgagagtgctacaatttcttcttttgaaattgagtctttcgtatttatagatgctatatttgtgtattttccgtcttctgtttttggaatttctaaaatccctttattcacgagatcaactacagccttatgctctgaagaatgtaaatctacaccagtaattttccaattacgcataacttttggagtgtatacaccattctttacctcttttaaatatgtaatagcaaggttacgaatggttccgcctgtttctccaaatgcattctcttgtttagatgaccaaatttgttcaaacttacgcccctctaaagctcccccttttgcctgaagagcctccattctatatgcattcattcctagcgtcataacatcgctcattttgattggtttgtttgtacgaatagagcgtaaatttgtaattctgcttccatatggttttgttaagtcaatttcgtattttacgcctccaaagaaatcgttcgtactgtatttagatgcacggcgggttttatcaaagctaacggttacatctccggcacgagatgagttaaaatatcctgctgcccattccatatagtcttttaaatcttttccagaaatcttatatactgtaatttctcccaaggcatattggtaattgtacgcaatatcttttttcttaataggacctgtatctaaacgggcataatcattatcaatttgatgggctactacatctgctttactgtagtagagcatgacttcatgaaagaaatctgataaaggtgtttcttgaatctgaacacttggaataccctttatttcattttcaggaacaagatttctaccctttaattgagcgactacaacatttgcatctcctctcgcatattcgtgaaaagatgttaatgtttcttcaagtgtaggatcagataatatcgttgttccatcagcattttttacaggtatagcggtagcagttttattttttaaagtcaacttcccatcttgctttgtaaaagtaaggtcaatacgtgaaatatgtgttccatatttatctggttctgtaataattacgccatttacaacttctttttttacaagtttatgcatgtgagccgcaaaaatagcgcttagttccggacaagcatttgcaatatcttgaacaccagtaccagggataccattctcattttctaatcccatatgcataactcctaccattacatctactttaccttctaattccttaattgcctttttcgtctcttctaccggatttttcaccactaaaccctctaagtgatctgtccctttttcaaaatcactaatcattggtgtattcataccaataatcccaactttaattccacctttttctacaattgtatatgcaggaagaaagcgctctccattttccttataaatatttcctgctaacgtttttcccttatattgctcactaacttttttcaatgtatctaatccaaaattgaattcatgatttccaaatgcccaggcgtcatatcccattgtattcatcgctaccatcattggcgattgtggtttatcgttgaataattctactgagtttccttgaattgtatccccagcatctactaatatggtatttggattttcttgacggaccttctttataaccgtataaagctgcgtcaaacttccactcatatttgctccatcaagcgcataatcccaaggcataaatctaccatgaatatctgcagtacctaacaatgtgatattaacttcagattcctcagccttagagatagatggtttgactattactgctgttccaagcagtaatagaattacaaagtaacatacatagttcttccatttcattttttgcataataataatatttctcccctttttgtactttcataaagttgcttgaactttaaaaatgtaacttattattcaggaaacttcaactacaaaagataattttgaaggtggttctgttgcaaaataaagagaataaattgcatacatcccctaacagaattgtattttatcgtttcctgacagaataccccttccttaagcgtgtgaagagtactttcaaaataaggacatatcattcatcatcataaaatcattatttcaatttactaaaattcgcatataaaatatgttatgatgattatttttttgaatttcattgtcgaagtatttccttctcaatgaaaatacttccaaaaaaataaccccgctcttcatttaagacggggttacacttatacagaaaatcggatagtttcatattttcttaagcttattggttactttcaactaatttcattctatttttgttttcttctgaatcaatatgaatcaaccgttttccctgtttataatacgcatcaataaatagggaatgatttttacttttcaatttcacaaagtaattttatctcttttatttgtgaaatatgacgctgttcatgtaaataaatcagttctatccactgatcaagggataattctccaagagctggatgcatcactgcttttttcgctaatatagactcatcttctattgtactcaggaaacgcatcaattcttttcttgattcgtttagcgtattgagcatttgctccacttcaaatggttctatacttggttcaatcatttctggagctataaactttttcgttctatctaataaaatagtgtgaatttctttacgctcattttgggtactatctaacttttttaatcctgatgaaataactgttataactctctcatctaataaaactaaatgatgacaaacttgtgcaatactccatttatccttatctggtttcctattaaattgagcatcactcaacaaattaatttcctcaactaattgatctctcgttttataaaacttgtcatttacaaatgtatccatgtggattctcctttcattgcaacctacatacttaaattcctacgctagaaatattatcttcaaaaaaagtttttctttcactactattccaatttcattttaaagctacaaatgaaattatttgttttttatatctttttaattggcacaaataaattaacctttaactttccgtctagatcttcagcaacattatttaagcaaaactctaaattatctctatcataatctgcatcatactcactatttggtagccactctgcatacatgtattgatacgcttcacttaatttatgaggttcatcatagaactggtatagaccatatgtacctccatctaatcttttaaattgcacatcatgatgcttttctttatcgaagttttcaggaatcgtaacacatgcatcatgccggcacttatgacttgcaacaagttcaggattatctaatgatattccgataaatgattgctctggtggataaagtttattttcaattgaccaattcagtaactttccccagtgatcttgtggttcaaagtagctaccagttcgtcttatatatgctacttctaatggtggaaatttttttataaaaactttcatttacatcttctcccctataaatatgtacactgtttatttagctttctttaaatatttattccttcttaaataaaaagaatcctctaatcacatgaattttaattgaaatacaattgattactattactactactaaagtagtatgtactttcatacttttatttgattttaaattctttttaaatcgatatattaattgtaagaaaataaaaaggtggaggattttaattgattaaaggaatatacgaagcgcatttaccagtataatgtcctatcaatttatcattaaataaatgtaaaaaataaccctatttattcatttttaatgcgtatgtatgtacatttgttaatttattcgatatattatgggtattgaatgattacgtgaagtgtataggtcgcttatataacaccttatatttttatatccgtgaaaactacaaagtgtatgaaaatccatttgtcaaatgaatttagtgcggaaggaggtttgtggttacttcatagggtataataatcagttttttactgataaaaatataggaggcgacataatgtttcgtacgatttcaaatttcatgagagtagctgagataagaaggaaaatcctttttacactagcgatgttaatcgtttttcgaattggcacgtttattccagttcctcatactaacgcagaggtattaaaagtacaagatcaagctaacgttctaggtatgttaaacgtatttggcggaggagcattgcaacacttctcaatcttcgctgtaggtattacaccatatattacagcttccatcatagtacagttactacaaatggatgttatacctaaattttcggaatgggcaaagcaaggagaaatgggccgtaagaaatcagctcaattcactcgatactttacaatcattctcgcattcatacaggccatcggaatgtcttatggctttaataatatagcaggtggacaattaataacagatcaaagctggactacatacttatttattgcgacagttttaactgcaggtactgcatttttactttggttaggcgaacaaattaccgctaacggagttggtaatggtatttcgatgattatcttcgcaggtctcgttgccgccattccaaatgttgcaaatcaaatttatttacaacaattccaaaatgctggcgatcagctatttatgcacataataaaaattgttttaattggactcgtaattttagcgatagttgttggtgttatttacattcaacaagctgtacgtaaaataccgatccaatatgcaaaagctgtttcaggaaacaatcaatatcaaggagcaaaaaacactcatttaccgcttaaagtaaatagtgctggtgttataccagttatctttgcttctgcatttttaatgacgccgcgtacaattgcacagctcttccctgattcaagcgtatcaaaatggttagttgcaaatcttgatttcgcacatccaattggaatgacactttatgtcggtcttatcgttgctttcacatacttctacgcatttattcaagtaaatcctgaacaaatggctgagaatttgaaaaagcaaaatggatatgttcctggtattcgtcctggtaaagcaactgaacaatatgtaactaaaattctataccgtttaacatttatcggtgcaattttcttaggtgctatttctatattaccgctcgtattcacgaaaattgctacgttaccaccttctgctcaaattggtggtacaagcttacttatcattgtcggtgtagcactagaaactatgaagacgttagaaagccagcttgtaaaacgtcattataaaggctttattaaaaaagtgaattaattattaaaaacacagttggttatttttccaactgtgtttttgattttatcagtcctgtaacatacagggctattgctttattaaattacatctccttctctaataaccgcccttttttgaaataagtccgtagtgttgaacgattggccaaaaatacaccaatcaatataagacaagcccccattcccattgtaggatttaaaggttctcctaaaatgatatatcccacaattattgcaattaatggtgatacatataaccacgtcgatggaaatactggatttgtttttgataagagccagtaatataatccgtgtccaccaatcgatccgataaatatgagatataaaataggccattgcacactccatgaagttaatacggttacatttggttgttctacaataatagatgcgattagtagtaaaatccctccataaaacatttgaataccgttaataagaaatggtgatacatttgataaatctgacagtatttctttcgaacgaatagagcctattccgtaaaataactcccctataactaacacaatacaagcaatactccatatgaaacttacttgttgatgcattcctggtaaagaaacaaatataacacctgctagtgcaataactaaagcaacgagttgttccatttgtaatttctccctatccctctttgcttgtattaataaaatcatcattggtcccgtagcagaaagaacagcagctaatcccgaagaaatatattgttctgaccaatataaacttgcgaatgtcataaatgttaaacaaaatccagcatacataatgcgttttgaaaatatatgtggcataatttcttttcgctttaatttaaaaataatcataaggattatgcccgctaaaaagaagcgaattcctgctgaaaacaacggtggcgcccctgcttcaattccaatttttatcgttaaaaatgttgtcccgaaaataatacatactaaaatgtaattaaaaatgaccattttgcttcctcctttttactcttagaatgagtatagaggctatggtgtataacagtgtatcggtacatataacagttacttcaagttgtagttgattccctatatatttttcgctttaattaagttaaaaagaaaaataggtgaacctatgaaaattgtattgcgtaaagaaacaaacataccgtattacaagcaaatatatatgcaaattgttgacagaatacaaagtggtatgctttcacatggtgaatctcttccttctttacgttgtatggccacagatttacaaatcaatgtattaacagttcgtaaagcgtataaacagttagaaacgaaagggtatatacgcatcgaacaaggaaaaggtgcttacatatataaacgggtaaagaaagatttcaaaccaattccgtataaatggcaacaaatgaaaacgattaatgttatgcgttctcaatatgcaatgaataagcaccgtaaatattataatttttcacaagcaattctgtatcctcgtctgttaccaaatccatttttggcagatgaaatgcataaattgctggataaaaatccgatgttgttagcaacttatgggccagttcaaggcgattatgaattgcgagttgaaatagcaaattacttaaatgaacaccagaaattagtgacagacccatctcaattattaattacaagcggcgcacaacaaggaattgatttaattgctcaaacattattaaaacctggagatattgtattagtagaaagtccatgttacagtgctgcgcttgatattttcatcaataaaggtgttcaaatcattcccgtttctcttgataatcatggagttcgctccgacttaattgatgatatttgtcaaagtaaaaatcccgttttattgtatacgaatcccaccttccagaatccgacaggtacagtaatgagtaaagaacgaagaatggaacttatagaactatcggagctatatcaattttttattattgaagatgattctttcggagaaatatattttgaggatgctatagtcccgcccccaatcaaaagttttgataaagatggccacgtaatatatataaaaggatttagtaaaacgttagcaccaggactgcgtatcgcagcacttattgccgatggccctatttttgaatggctatatgcagtaaaaggttcgatggatatcggtagtcctttattaacacagaaggcacttctaccatttttacgtgcagaacgtatgaaaaaccatttagaaaaattacgtacagctttacaaatgagacgtgatttaacaattgatatattgtcgccattaaaagaactacactttgaaataccaaatggaggttttaatttatgggtgacactgcctgattcgatagatccctttaccttattacaaaaagcaaatgaagtagatgtctcttttttaccaggaacagcttgtctattaaattacgaaacaaatgataaccaattaagaattagctattcaatgttaaacgagaaagatatggaaattggattagaaaaattacacgatacaatacgaaacagtatttgttagaagtaatatcacaatagctaacaatagctaacaataaataatactcgaaaatgaaaatgtatagtatgggatattatttattgttgagctttttcgttattctgaacaaccggttttaaaacttgtctttcttttaattcttcaacaataccatattgatcaataacaattgctttcatttcctctcctccttgctgtttattttaataacatacaattatttctcaaaattttttgccttgaattaacatataattatttttgggggtaattatgcaagaagcattataaagtgaaactttaatcaaccctcgccaatcgggctttttcgggaagttggtcccctcccaacttctttactttccctgaattttaagatgggactcttactgtccagcaaatagcgggatgaattccaccacgaatcttacacacatcttagaatcatccaaaattgttttattaattaaattcaaaagaaatgaggctaactatatgagtgaaaagatatttaaaataaacggaattgatatatgtacagaaagctttgggaaccctaagaaccctgctattttattaattatgggcgctacatgttccatggtttattgggatgaagagttttgtgagctgttggctagtacggggaagtttgttattcgctttgataaccgtgatgttgggcgctctgttgcctatgaacctagaacttccaattacacagtaacagatatggctgaagatgcaattggagtactagatgcttatcatattgataaagctcacctatttggcatgtcattaggtggtatgattgctcaaattgccgctgtaaaacatcccgaaagaattttgacgctaactttactagcgactagtgtaataggatctgatgacaatactcgcgatttacctccaatggatgaaaggattttaacacatcatgtaaatggcacaagtatagattgggcaaataaaaatgatgtggcagagtatttagtttcaggatctcgtctattatgtggatcagaacgaatatttgatgaaaatagagtttataaacaagtaaaacaagaaatagaacgcgcaaacaatttattaagtatgtttaatcacgctttacttcaaggtgatgatgcatatgaaggtgtacttcaatccatacaagcacctacattagttattcacggaacagacgatacagcactaccatttgaacatggcctcgcactaattgatgaaattccaaactcagtactattaacccttaaaggggcaggccatgaaaaccatccagatgactgggaaagcataattaatgctgtttctaaacatacatctaaaatttagataaataactaatggaagggtcacaaattgtattgtgccccttccatttacaaacaaaaccccatcactgtattcgtatgtatagtgatggggacttcttatatttttctatgtttaaaaaaatggacaatctaattgatcaacagattcccataattttttttttgcattttcagtggatgtatttgtgtctagtgtcatgtttttaaaagggtttacttcgacttttaataaggatgaaggctccacatataatgagaaaacatggctgcttggtaaagctttagaaacgtcaatatctcctacttgtttaaatagttgctgtgcagcaaagaagaagaaattagttggatttgattgtttattcagccacgcaagcatttcaggtgataccgatttatgaatattgatttttactcgatcaccacgtttatatcgcctagatcgcatacttccaccaactaacttatcgttaagtttgtaaatcctaactctttttgcttatgctctctatattttggcgaacaagtatagactaataatcctcgtgcatttgtaaataacggattatctacaaagattacatttttgagtcgtcctttttgctttaaaatcatttttaaactgtttttaataattactgcacccccgccataaataaacacgtatggatcgtctttcatatcatcaattttatttataatatctgttgcaacacgcgctgctaaacctaatagcgctggctgtgattcctcaactaataatgtatttctcggatgcttatcatttaaataaatttgattgaattctgtaatgctatcaatcgttttagttggatacttccggttccatctcgtaatgatttgtagtaacgtctcttttacaccataagataaacctttacttagttgcggacggaaattcacccctaatgaaacgacttcttctgtcgtccctgcgccaatatcaaaagagagtaaagttttatctacaaaatcaatttcagaaacttgattttgctcacattctattttatgtttcacaacatttccttcttcatcgtatacaatgccccacgtcccagaagcaccctcaggtaggcatttacaatactcaattgaaacattaattgtcacatcgcgtccgttcggataatggaaaataaccttatgatttcccatataacgttttgcattttcagcagctatttcttgtgtaataagctgcataggaagagcgacagataaatcataacgaatattaatatggctagaagttggactttgacgcatagcgcttaccgccaaacctgatagtattgtaataaccattaactcatccgttgacttatttgatttcttctctacctcagtaccttttaattgatcttgaatgactttttctccaacgatgtatcgtacattatttagcattaacgatggagaacttatagtcacatcaatgtggttttctaattcagataatgaaacatctacctcatctaagagtcctgtaggctcacctatatataaagaataaatactcggaataaaaatagggtcttgccctttcaccattaacttcaaaccgttgtttcctgcatctgcaccagcttttaaaagtatagacataactaccccctaaattaatctgacatcccttccaaatatatgcgagcccattcttttacattcaaatgtattgtaattttttatttatcatagaactaaaatattacatacttacatatttcgtgtaaaaagtatttgacatgatacttttccaattttatacttatatttgtaaagagttttttacaatcgagggggcaattatttattgaatactaaaaaaactatttttataatcattgttttagcattaattgcaatactagtacatggcacatataaatacataactgaaggttctattttgggcggtacaatttttgctatttcgttaatacttagtaatttaattaattacattacttggggagatccccacggtgtatcagaagaaagtcaagatgaaatgggacaacaaattacatataaaagctttaaaattgcatattttgtgcttgtaattgtaatgttccttatattaatcttctctgaaggattttctatgggggctaatttagatggagtaaaaaacctccctctgttcatcgcaatttgctcttccttctttatttatcctattgtcgaactcgtagttgcaaaacaatataaataaaaagatgaggttttctacatgtagaaaacctcatctttttatatttacataccctctacaattgcttttaatttgttcacagtccgccaattcctaactgtagctggtgtatgtaacttctgaaactggttcattaatttagaatttcgaatgctatttttgaaaaacaaataaacgactttctcatctatatagcaatcttcaagttcacttttaaatataagcaattgactactctcttcttcagaaagtacattcgctaaaaaagcaacatgaacactttctccttctaacaatgaatgaacttcatacggacattgcttaataatatttataaattcatcatgtgttcttagcatgactggaacatcgaaatcaaattcattttttatttccgtttgtattcggtcttttagaaagtttatatcttcctcagattcgaacacgatattaccactttgtatatacgttttcacttgttttaaccctattgattcaaacactcgttttaactcagccattttgattactttatgtccaccgacattgattcctcttagtaatgcaatataaagtgtcatactattccccccacaataaaatgaacttatcaattgaatcgatttccccactcatatttctcggatatttgttttaattcttctaacatatcatgaatagataatacctcaaataaaataatatactcacttgaaaaatggtgatgataatgatttggtttataatcttttaaatcatttttataactccaagttgagatattaaaaaattcacaaactaacactgtaagaaaaactgcaatcccagttttaatcactcttcccccaacgatattccattttctatcttgatttattttttatatccttcatttctatttcattttatatacatatattgtatattattaaaataaaaaaacctactacatgaatattcaagagtaagttttctatctcattatttcattatagacaaatgcattattatttgttggcctattggtcccattcttctaaaacctttatcttggaagccgacttttgcatataaattttgtgcaggaatatttctttcattcacagcaagtacaacttcattttttattggaaaataacgttgtacaaactcttctaataataacaatgactttttagcgaatccttttctttgtctattgtgattaatagaaaatgatgttaaaagtaaagcatcctcattatctgtgaactcctttactctatctcccgtttccaatgcgaaaagacccaccggtaccccattgtaatctaaaataacaatcacattttttgtacgatcactttttgctttctccagtaatgcgcttggatctgatgtaaactgaacttgttcacttggtaaagtaaatgtttgtataacttctttatatttctccttatacggaactaattgaatttcccctgtgtgtatgttcatgctaaactctcccattttttagcttattaacttataccttgctgtgcttttgaatgcactcttccatctaaaaaggtaatttcaacaaatgaatttggattgtttcctttccaagcaaaaatttgtttaatttgtgtagaatgttctaccccttcttctataagtaaatctccttcaaaaccaattaaatctttcacttctgtataagtcatcccttcatttatactcgaaaaatgatttatattgatagactctttctgttgcctttccatcacagtagaagaagttgctgtttgatttttcacttcttttctctgttcacacgctgtcatactgaaacctaagcataaaccaaacaatatacatgcgctttttttcatcataacagttgtccctcccatcataattaaaccatatttttccttaaaaataaactgaatatttaatattatatttaaaaacctcgtacaattaagtacgaggctaatttcatttattcaaatgattatttgattgatcattctgttcttttcttaactcttgttcttcatcttttggtaattgtttatcattatccttaattggattcgtttctctattttctatcatatcatttggaacttgtggcattactcggcccacaatagcggctaattcatctagtataccttcacctgtttttccttttttaatttgctttccaatttgtttgagccgttcatacgtatcaacatctgctacaacgactgcattagcaccgtcagggtcattttttaaactttctgcaacagagtatttaattgattcaactcgagttcgatcaagttttgcttttacatcaatacctacaatagcatattttccaacaacgaccgcggttgcatcattcacacctggcacacttgccgctaaagatgctaaatgatctgctgctttttcatttggcttatttgatttattcgtataattaacatttttcattgaaacatttttttgttccggtttttcgtttggattgtctttttttccaatactgcatccagttataacgaagcaaagcatcaatatatatattagagttttcattattttcaccacttcactattaaggtttaatcataaattttttcaacagcttgcattttctttaccttttcctcggccccgctattagcattaatgaatatttggtacgtatcttttcctaaagtgcctacaaattcatagcaaagcacttcattatgcaaatcattgactactaaagctttacgttcttccatgacttttacatccggattgattttctttcttgcttctgctgcagttagctttgccgatggaactgttcgcttttgatgtgacgctaaatattcttttgcggagaacccaacgatagaaccatcatctaaagcaattttcatttggattgcttctggataaattcgtactccattttcatttactacatacgtaaatacaccaacattatcatattgagagctatcataaagctccatattattaaacttatggtcctttaaaaatttcaaacctttactacctgcatcgtttaaactaactttctgttctttaatttcgcggttattcataacccaaattggatatccgccttttccggtaatatccatatagaactcattattcgttgcttcatctttaattttcacactatagaaggattctttcgcaccttttccgcttttctctacatctactttttcatttccttttaaattcagaaacgattttgcgattttcgccgcttcatctttagaaattgcctttccttccgcttcaaatccgccttttttatttttttgcgcacttgtaaaggtcggtccgaagtttgtagaagaatatgatgttacgtttttctctacagttttcaatccatcaataattgtgttatctgctggatcgcgatttgatgcaagtgccatttctacatccatccagcgtaaattatttttcaaaacaagatgttgtacttttcttagttcatcttgtatatttcctgcatttgaatataaagtttgtagcgttttatattcttgctcatttaacggctctttttctaaatcacgaatggctgcacggtaactgaaatcaccgatattcgctaaaaattcttccgttttattaaatggcattaatgttaaaggaagttgccctacatccgagcgagcttcagatgttaaacgccatacatccgctaatgcaggtgataaagatgatcgtgaattcatcgcaagtgttgtgccaattttatcgtgtaataaatcgacttcgtatgctaaatcatggaatgcacgttgatagctattttccgctcgaattaaaactgcatttttctcttggtgctctttatagccccaatagcctgttcctactacaccgactgttaataatacaatgataatacctcgtaacattgtcccacctccgctctatttacagaaaatatgtttaccgatttttttaatttgtggacgagtccaaatccatttactagtcgcagtatctggattgaaataatataaagcatttcctgttggatcccatccgttaatcgcatctaaaactgctttttttgctgtttcatttggcgttaaatatatttgtccatcggctaccgctgtaaatgctctaggttcaaagattacacctgaaacagtatttgggaatgacgcacttgtaacacgattcaaaataacggcagctactgcaacttgtcctaaatacggttcaccacgcgattctccgtatactgcgtttgccataagctgaatatcattttgagaataaccgttcggaacatttgtccctttattttgaagtggtttattctcttgtgcagtgccaccgctatttcctttattcgttgtcgtccctttattagcagttgacttgtcatacttcgttgccttcacgagcatttgcttcgttttagctccagctaaaccatcaacgggtaatccgaatttctcttgaaaattccgaagtgcccaatatgtaccccatccgaaaacaccatccacttttcccgtataaaacccgttatatttcaaacgagattgcagttcaatgacatcttcgccagatgctcctctttgaataacttgattagaaaaagcctctacattctttaattgtatactactgaccattaaagacagtcctatgaacgcaagtaaaactgctattttaaaaatagctttttggcgcataattttccctccttaattacggaaatgatttcttggttatgttttgtaaaagcctcgcttttatgtaaagaagacaaaaaaatccaaactaatatcgttgaaaaaatatgtaaacaatataaaaaaggataaaaggagttcatcatgaaaaaatggttaaaacgtgtcgcacttgtcattctgttcctaacaacatgttcaaatatatatacaggctcatcaattgttcatgcgcagccgccgtatgccaaatggggtaaacttgccgtagaaaagacgaaagaacaatacccaaaagcagaaattattgactatcttcatataggtagaaaaccaaaaacagttcaaataactgttgaaaaatttaaattgtggttacgtgagaacggaaaagaatacggtgtttttgttgatgtagaatttgaaacgaagacggagaaatttataaagttgtcgtttcagaagacgagtagataaagtgaaaccttaatcagcgggggttttgttcatctcccactaatcatcagccctcaccaatcggacttttacgggcagcccgacaaatagctggataaagtgaaacccccactgttaaaaacagacacagtggggttcttgcatttctaaaattcttttctaaagtttcgattccctaaaaatcttaccaatatacaaatagcaccaattacaactgctatccctatactgtataaaagtactttaccatatccacctattctcggatctaaaaacggatatggataccaattcacgattggaccacgtattaagctatatacaacgtaaaaaaacgggaataaaagccaacttgcagcttgtttccaagtgattttcttaataggtggatttaaaatccaatctaaaagcattataatcggcatgatataatgtagcacagtatttacccatggtattgccgtttgaagtgactcttctaaccctcttagtaacaaaaaataaacgagtcctgtcgtaagtatatataccgtcgccgcaccacgaagtatactaaactgctctgagcgaccaaatgtagctgttccgatactacttaaaaggagaatacatgcaactaaaatgttactttcgatagtaaagaaactaaaaaagttaactggattgaacggtttcacttgtgccctgattatgaattgcgtaataatggcgctacatactagaagacttaaacagaatctaaataaagataaaattttttcatgcttcatacattccctccttttcttatatataattagaatttccctgtacatgctcaataaatagttttaatggaacgagcccacgttttggcatatgactacttataatagctactacttctaactgaggaatgataacgatgtattgtccgccgtatcccatagcgaaatatatacaatacggtatgtgaaatctttcggtatgtaatacccaccagtgatatccatatgcgccgacatgttcatatgtttcaaaatgcgccctacttgactcttctaaccatttcgctgatacaatttctttttcattccaatatccattttgcaaacataattttcctaattttaataaatcggtagatttcattttcataccgaagccgccgacatatataccctgcggatcttgttgccactcgtattcgttaatttctaatggattaaataaatatttctttgcaaaccgctctgtcgacattccagtagcttcttgaataatatagctcagtaaatgagaagaacctgaattataattcatttttgtagcaggttcttcaattattggcttttctaatatgtactgtacccagttctctgattctacaaagtcatttgggaatactactccattcccaaactctttccagtcctcaccagtagtcattgttaataagtgatatagtgttaaattatgttttcccctaggtacattttcaatccactctgtgatcggtgtatgtatatcatttatatagcccttatcaactgcaataccaattaataaagatacgatactttttgtaatcgaatttattttatataagttatttgcacattcgggtgttttataatactcagttgttaattgtcctttttgataaacaagaaatgtattcacttttttcttttcgaatttattttctagttgcttgaaatccaaaaactttacctccatttaaatagttaatccatttattatatcttgttccttcattttaaacataattgtgctcaaataaaaataaacctgtcagccataatgaactgacaggtttatttttataatttcgtacgaacattccaaagctctgggaagaattgttgatcaagtactcgctttaaataagaaacaccggaggatccacctgtacccattttatgtccaataattctttctactgttttcatatgacggaaacgccattgttgtagccagtcttcaatatcaatcaatttttcagcaagctgatataaattccaatattttttcacatccgcatacacttctaaccatgctgcttctactgttgcatcttcttcataaggctgcgtaatatcacggtttaacacatctttatgaatagggaatccttcttttactaatgcttgaatcgcgacatcatatagacttggtgcatgtagcgctttatgaagtcgtgcatgtaattctggatccttttcataaatttttaatgcatgtggcgttttatagccaagtgcatactcaatcatacgatattgatacgattgaaaacctgaagcttgaccgagtgaatcacgaaactcaatatattctgatggtgttaatgtcgcaagaatatcccaagattgaataatttgagactgaatttttgatacacgtgctaacattttaaaagctggttgtaatttatcttgtttaatagattcaatcgccgcatttagctcatgtaaaatgagcttcatccaaagctcacttgcttggtgaataacgataaataacatttcatcatgatggtctgataatcttttttgagaagatagtaaactatctaattgtaaatattccccatacgtcatattctctttaaaatccgtatgaatccctttttccataattactttttcattttctttcatattagccaaacgccccttttatatgattctacttatattggtctaataacggctcgaaccggacttccatccgcatcagttaatgcaagtggtaatgcaatcaattcataatcaccgtctgctacatgatctagtacgacattttctaaaatatgaattccatgtttaaataattgatgatgcgctgctaattctttatcatctagcggatcaactgatggtacatctactccgattaaacgaatacctttctccgaaagaaaaggtgctatgtctgcacgtaaatgagggatcacatctggaaattcttcagcttttccatgtgaagatgtacgtaataataatcgttctacaccttctaaatgaaagctttctaattcctttttcccgatgctttcaagattagaaacgtcaataatccgtgctgggccaacataaacttgaacatctaaatccaatactttctttccatcattatcaaaatgaaatggtgcatcaatatgagtgcctgtatgaatactcatcgttaactttccaacatttaccgagccactttcttcttttgaccatgaaacttcatatgagaacggtgtgtctcctggccacgttgcaatatcattatttagcggttgtgaaatatcaatccactctgatgttttcatgcttatgccacaacctctcgcttattttcaaactgtttatactcttcttctttcataattttctttaatatttgtacagatttccacacttcttcatatgtgttatataaagcgaccggcgccagtcttactccattaggtgctcggaaatcagggataactccatttgcttttagcgctttacaaatacgtgctgcttctgcatgttctaaatatatgtgcccgccacgtttttcatcctctaatggatttccaattgtaaatccgaaatcttttaattcgtgatcaattaaattcagcatatatcttgtaatatgtaaagatttttcgcgtaaacgttcaataccagcatctttaaacatttcaagagaaccaattaaaggtgctgtacttaatacgtgcggtgtaccaatttgataagcacctgcatgatcggcagctgttaatgtatgctccatatcaaactgtttatcttttctagaactaaaccatccagacaatcctggcagtctattaaaatgtttactatttacataaaggcctgcaacactacccggtcctgcatttaaatatttataattgcaccaaacagcaaaatcgacatcccaatctttgaaatgatgcggaatagatcctattgaatggcataaatcaaatccaatgtgaatgccgcgtttatgagcttccgttgttaaacgtttcatatcaagaatttgaccacttctatataaaacagaaggtaataaaattaaagcgatatcatcttccagcgcatggataatatcttcttcagaaagtgttctaccatctcggcttttcactcttactaaatgctcctctggatctaatccttttaaacgaatttgactttgaagtgcataaatatctgatgggaaagtcaattcatccgcaagtatttttgtacgtattcctttcggctcataaaacgtcgcaataacttggtgtatattcgcagttgtggaaccggttacaatagtttcttccggtaaagctccaataagaggggctgtaagtttacctaatttctctgaaaggaaaaaccacggatgctcaccttctgtccagccgtcaataccatactctttccacgaatctagcaacgtaagtaatgatttctctgctctttttgaaagtagccctaatgagtttccatctaaatatatagtaccttcttttttatagaattcagtttgaaaatctttcagttcatcatgtttatcacattcaagcgcatactcataagttggttgaaatggttctttatacatggtgtcaccttctcttaattttctttttattctaactaattgaaatatatcaccttaattgatacaacgtcaatgatattatgtcagttgactttatatatgaacttcttttacaatacaattatattttcagatatttcagtataaagaggtgattctttgaaaaacagtaccctttcatcaagaaaacaccgctccttagaaacgaagaagaaactattacactctggttacactatttttatacgtaacggatttcaaaaaacgacaattacacaaattattaaacatgcagaaaccggatatggtacagcatatgtatacttcaaaaacaaagatgatctcctaattagtttaatggaagatgttatgaatcgtttttataatatcgctgaacgctctttttctccacaaacaaaagaggaagtacgtataatgatccaaaatcaagttagagcattcctgcaattagcagatgaagaacgcgctattttgcgagttgtagaggaagcgataggattatcaagagaaatacggcaaaaatgggatgagattcgggaacgttttataacaagcattaaacaggatattacttactctcaagaaagtggattagcacaacctaatttaaataaagagattgtagcacgcggttggttcgcgatgaatgaatcgtttctttggactattatgcaaaatgacaaaaagattaacttagaggaaattgtgtatacgttaacggagatgtatacgaccgggttatataaatagcacaccttcaataaataaggtgtgctattttacatctataaaaatatattatccgggtatggtagtgctaaaggaggcttttcagaaaatgagaaatattgtagttttaaagattcaccatctatcgatttcagttttccactagtaatttcacactcaaacacaacaacaatatattctaccttatcgccatttgcatatgtataacgaaactctttccctccaaatacccctttttgttttttcacttgtactttcaatcctgtttcttcccatacttcccgaattactgcttcttctggagtttccccaggttcaattgctccagccggcaaactccaatattctccgccaggatattgaaataagagttctccctgctcgtttttaataactgcagctacacttggcatgaatattagttcatgtcctaattgctcccggatttttttataatatagcgacatcgacatataattctctcccactccattaatgaataactgtattttctgacatatattctataataataccaataacaatttctatatagaaaggataagaaaatgacccaagtacaactagtaaatagcttcctatcatttttaggaacgacaaaacagcctactagcttaaagtttttaaatgagcttattaaagctcatcaagaaaaagtaaaagaaccaatacacttatcaaatatgaaagaacttatttcaaggtctaacgattggcatacatctcctgtattaaagaaaattcagattttcggttatatcgatggtattccaacttctattaatgataatgttttaaaacgatatttccaaggtaagaaaagagaacaaatcattacatcttctgaacttaattattggataacagaaagattttgtgttgataaagaaatatatgaaagagctattgagattttcaatgaaaaatcttcaaatagaatattacaaacaagttctttaatatctttaggctgaggtaaatagctagttgaaggagcaatttcaaaattaaagcttatatatccacatccagttagccacatatagtgacatttcaactcttcatcgaacatatatttcacaatatctataaataataaatctcctgcgtattgcaacagaaactccatattcgagctacaagtataataattgtcatcgtcatcaagattttttatattatattccgccaaatcccataaaaatcttcttttaatatatttttaatttttccaacaatgcttatcccccgaattttcccaagaataactctctaatctacttaaaataatttcagtaaattcttcagcaatgtccttagaaatctcaccacgatttccaataatatcccaagcaatactaattgaagtccatctcatcaatgaattcttttcaaattttaaaaactctattatttcctcctctttcatttcacttagaattgcttttaattcactttcttctaatttacttctttgattataatcagtttgatttagtatttttacatattccttactttcttgataaaaaacaatctttacttgttctggtgataaatccgctaatagtttttcaatttcttcagcgcctatttctttacctttatttatacatttgaaataacatcccattttaacttttcattaatttcactcataagttggggtattactacttcaccatattttttaaaacattcatgagttccttcgtaattttaaaataaagtttgattaaaaatatcgttttaacccgtattctatggtaaataaaaagaatccattttgaaaaagattgatcaaaatggattcttatccagcaggtttatgttttggttttataaaaaagtttgatcattttctatcaatgaaaacaattaattgactatttttattatgaagaggtcggagcaggaaattcatcaattttgatacgaagtaaactataaggtttctgtcgtaagtcttttccataatgaaatctaggctgtcgatgtaattggttcacaatgacatacaaatattgatccggaccaattgaaaaagtatccggccacaaaattctcggatcatgtgcgatagcttccattatgccatttggcaatatcttacggatactgttgttttcataatctccagcataaacagctccctttgcatcggtgatcattccatcagacgcacctttttctccccaatactccacatgataaggtaaattcatgtccggtatcgttctgtctctcaaggcttctgttgagatcgagaacaaatgccgactggttagtggagcaaaaaataatatctttccatcgggagaaatcgcaagactatcagacgccaacctaaatggagaagttgaaccgtctttgtttcgattcattaaaatttgaccttctactttcggtaaaaaatagggatcgggtgaagttgaatttgctccatttaaccgtctaaacgcgtttccatttgataaatctacgacgataatagctcctggtcctcttgaagaagaatccgttatataggcataacctgcttttccaacacgaaaatcaaaacggacatcattcagataagttgtaggcaggacaacatcttctgtaaaggtatatacttttcttattgtattggtttctaaatcaacagcgactaattttgccccccctttaataggttcagaaaaattgggtgccgctgtatctaatatccaaagcgttccccttccatcagcaactacactttggacactgatgaaagtcattgggatattctcgggattaaccaaattggtttgtaaattaggataaggctgcaatttatcctcaaaaatttccgccaccgtaaatttaacatcgtctccccatttcggaaagcaaatgaaaatacgaccggtttctgaaacagtaacacctgtaggcatagccccataaaatgcataaactagttctaaattaccgaaatatttttcactaggtaacataggtttcataatatcctcctcaagcattcaaacgggatatctcctatatatgatttatattttttctagtgcatgtttcttaataagtttttctatacgaaaagatgattgaattgattgttttcgaaatttaataagtctgtcagaagaaaggaaacattttaatttaaaggtctccagatgaagtagaattcaattagcaggtagcgaagttcaacattcccgaatcaacgttaagctggtataaaaaatggggaaatatccccctttaaatttgtgaaaaaatgtacttaagctaaactgcccgttagtttaagtgtagcacttcacaaacaatcttttgagtattcttattattcctgtttcctcaacaatctggccctttaattgaacaatacaactgaaatttaaggggcgaaagaaaaatcttatattaatacagggttttatcaatcttttttataaattatcaaactttattttaaatcaataccacactttattccatgttccatgagtgactaacgggtgctttgaacaagaaaataaaggtgagtacatattatacatgactaatatgcgctcacctttatttttttaggatttttagcttttaggtcttgataataatttttagtggttttattaacaatttatatttagtaaaattgctttttatgaatttaatataagtccaaagaatttcctggtcaatataataacgtatatcagcacactttttctttattcagtctacttacaattccaactataaatttatattcaatcctcctcttcttagtttttttaaacccttctttcgtatcaaaaataaaacacgttttccgaaaccaaattcgtacatataaagactcaaaataaataggttttataattcctcgttcctcaaattcagttccatctttattttcagtttctgttcgaacgaaccacctatttccgaagccaatttcaatatacttcacataagtccccctttcggaaattaatttctaactgttctattatttccccggtaagcgcacattccgacagaacatgagcccacaaagaaaaagtagattgcaaaaatctactttataacttatatttttgcattcgtttataaaatgtactacggggtacatttaatagttttgcagctaacgaaacatttccatttgtcttttgtaatgcttcaatcatgctatcacgctgtattttttcgcgaaaatgtaatgtatgttctgttttattttcaacttgtaactcaagttgttgttgatttcccctcattgtttgtaacaaaaaatctacttgtttttcgcatatttcccgtccttgcgacaaaatgtaaatgcgttctaatacatttactagttcccgaatatttccgggccatgtatgttgtaaaaattgattgtatatactctttggaaatacaacattccaattcttccgttcgcaaaagtgttgtataaaatatgggatatcctcttttctttctattaacgatggaacatataacggataaacgtgcaaacgataatataaatcttgacggaatttcccttcttctactaaccgtagtaaatctttatgtgtggcagtaataatacgaatatttactggtaccaattttgaactcccaattggagttattgtgcgttcttgtaaaacacgcaataatgctacttgcatctctggtggtacttcaccaatttcatctaaaaataatgttcctccgtttgcttgttcaaatttccctttatatccttgacgtcgcgcacctgtaaacgcaccttcagcataaccgaacaattcactttccattaattctttaggcaaagaaccgcagttaacagctataaagggcccgtcttttcttggactattttcatgaatcgctctcgcgacatattcctttcctactcctgtctcaccacatacatacacactagcatcagtcggtgaaacaagcttaatttcttctagtgtgtgttgaaatgctctgcttgtcccggtaactcctgaaaaagtaatcccttttataaatgtgagagcagaatatgtattcatttgtttattttcctttaaatacatacatttcccaatcattctttcattactatatactggtatctctaatttagtttccaatccatggtgcattaactcttcaagtttcattcttgaccaattatttattcgttcacgaacgctcttactcgcagaaacgataacatcacgatgattacaaataactacttgttcatcactatcaatgacatctaaaaaacgatggattaagtgtaattcattttgatgaactcttatgctacattcacgttctatcgcatgtgcaattgaagttaccataccgagcatatatggatgcgaaaattcaatcggacacgagaaatctagaacaccaattaatttcccatcatcattatgaatgggagcagccgcacaactccagctatgagatgccacggtgtaatgttcagtaccacttatcataatagcttcttcaatttctagcgctgttccaattgcatttgtgccaacagctgattccgtccattttacaccttcaataaaattaatatgtttcgctcgctttaacgtttgtttatttccacttaacgatagaacataaccatctggatcgattaataatgccatcatttgtagttcatcaatggtttttctcatattttgtatttgaggtaatgcgatatcaaggaaaatttcactctttttcttttgttcttgaaaaatgttagaagacaaaattttctgacctttattcatgtgaggattaacattagcctgtttacatcgatgccacgattctgaaattctttgatttatgcgatttgaatcaagaacaccttcattaacaaactttttccatgtatgtaagtaaaacggtgaagctaacattgtatcatctcccttttaattgttttggagatttataaaacatacttttattataaaactgaataaaagcgttttcaatacaactagcaagacgacacaaatatgttaataatttgaatatcttaatgcacttctttattcttttttagtagcactatattttgtataatggacgcaaagaaaatacataaccaaaaccacttttgtggattaccatttataaagaaaacaatcacggctattgcaaataaaatagtggatgctaaactaaaatataattttgttttaatttctcttatccctcacccctctgctactttacagtacatactaactcttcatttttcatctctactatgtactcctgtaaaacatattctttcccgccatggttttcataccattcatgtattcctttaatatgcctctcgtcacttctaattttcgattctatttcattatactgttcataactatcatattcccatatggcaaatacttcagacgtaccattcttattatctttcatccagcgtcctattagcctagaaccatgctttaattgattaggtaagttcgtgtgattgaaatgatcattaaatacttctatgaattcatttttcactacatagtacttccttctgtaaaacatacttcttcacctctttcatgaaaagtattagtaaatcttcccatcactaccgtattataatactttccatccgatagtcttttgtcatttttcaaaatgccttctacttcaaaacctaattttttataaagatgaatagctttctcgtttgtctctaatacttgtaaagatattttatttactgcattttcgtcagcccatttaatagattgttgtaataggctcttccccattctatatccccaaaactcttttaaaatacaaacgccaaactccactttatgagataatctcttaaaatttgatccttcacatcttgaaaatccaacaattcgattgtgcacttctacaactaaaaagagattcttcgtttcttcactatctgtttttattattttttgaaaccctaggtcatctataaatccctctccagcatctctatccatattttcagtttctccatcaatctgaactctaattttcgataactgctcagcatctttttcagctgcagaacgaattgtataagttaatccatttatatgatactcttgctcttttacaatcatgtcaaactcctttcaaatcaatataatggcgctattacaacttgtttaccttgtttctcaaattcctgaacagtttctttactagcctcttcgtcagttataataaggtcaatttcttttagagactctcctcttataaaacaatctattccaagtttattatgcggagctaaacaaatatttcttctagcaatttcacttactcttttactaaaataagcaacttcaggtgttgtgcagtactaataccttgtaatgaaatgcctccacctgtagagaaataaagatcaatagaaaatctacttatcaattcagaggcaaatgtatcagtaatatttcctgaaggctttacttttccaccaattaaatatgtatcgatgttcttatattctcttagatgaccagctatttctatagaattcgtaataaccgtaaatgatacttccggtaaatatttcagcatcgcattatgaatggaagccccgccaataaaaatagaatcatcttcttgtatataagatgccgcaacttttgcaattgtgttctcatatattgagctatcactataacgtttagctggttccgcagctaagttcctcactcgcgtaagttcaattgcacctccgtgcgttctttttaataaaccatccttttccataatagacaaatctcttcttatagaatcaatagacatttcaaatctttccgcaagttcctttgcgattactcttccatctgtattaagtagttctaagattctctctcgacgttcttcagtaaacatgttatcaccaccgttattgaagattcagaaacttaaactttattttaattatatgtatgcctcttctgttttacaatattttcagttcttatttattccgttttatacagtcttctcccgctttctatcccattaatttgccaaccgaataaatgtatatctgtatattacgcaaaaatactttcatttaccttcctgttgatgtaaaattattcctatgttttactttttaatacagaaagggattactatgaaatcattaatcaaaacgacatgtacagcattattatttactggaatattaacaggatgtaatagcaatactacatcaaaacaagaaaagagcgctctcgaaaagaatgcaatgcactatggagaaatagttaaaaacgaatactatagagcgacagttgaaaatgcaaagtttgaaaaaatagacaaagagcgacgccttactactcgtgttatgattaataatgttcgggacgatggacaaactattgatctttcggaaataaaatatttcatacaagatgaaaaaactggtcagaaatatgaaggtgaagctcatccgatagatgacgagcactataaaaatgttccacacgaattctctttaactactgacgttgtgtttgaactgaaaacttcaccaaaagatttaaataatatgtatttatacatagatagcaaagcagcgccgttaacagatacatattggaagcttgataatttagtatctaaatagaaagaccagtcttacatgactggtcttttacattcatacatttaactttcattaacacttatattcattttctaataacaacttgaataacatcagctaaaccagtgtgccctttcccttcaattcgctcttgttcgccattaaagaaatgaattaccttatgttcttcacaccaagtaaggatatcaattggatcatacagcatatcaacatcttttggtccaccagtactatagtttatttgtttttttgagtaaacttcaaacataattaaaccaccaggctttatcgtttgtatcattttacctaatatcatttttttataattatcatgaaaatgtccaaataccataattgctacatcatattcattttctggcaaactatcagctaataaatctactttttttgtatgcacgtttacgttatgcttctctgccaatttttttgtcttctctaatccatcttccgaataatcaatagctgttacttcgttcccttgtcttgctagaaatacagcatttctaccttctccctccgcaaatgctattactttattgtgatttgctaaacgaaatgcttgttctttaataaatgtattaggttcttccccgtaaaaatattcatctgatttatatcgatcattccaaaatttagtcatcatcttctctccttcttcatatcattttctaactacaattaaagatatcgaagagtctttttatccttaattaatttaaaaataaaagcagattaaaaatccacttttatttttttcgcaagatctacgattttttgatttcgtaacttttcttccattttctcttctgctgcaagcattacttcattaattaaacatccaggtttgtcatgtaaacaacattcaaacaatgatgttttaccttcaattgcatgtataatatctaaaaatgaaatatcttcccaattcttactaagcgagtaaccgccctttggaccagatgatgaatgtatcatcccttccttcgtcaacttagttagtattttagacaagtacgttggtgaaacattttgcatttctgctaattggtgaacactaactaacttatttggtgtagcctttgccagaaaaagcattgtatgaagagcataatttgtagctttagaatatttcataatacagctcctattgtagacttcatgtatctacaataactttatttttttattatgtcaaacgtttgtaatactccatacaacattatttcttcacaagtaatacatctgccgcgaaaatcgtcacttctctaaatggagagtcaaataaaacacctagtttaaaaccatcttcagtaagagctatttcatgatataaccaccaagcattttcaaagttttccggcatagaacactttgttactcctataaaggttacttcaagtaagtcatttgattatttaaaagtggatgaacaaaatgttaattcatttgcaaaattaaatgatcaggataagaaaaatatccaaattactatggtattaccagagcaaaatgaaaatagggattggctagcttacggttttactagtcgtgaaacattagatgcgtatattgaaaaggataaaaaagcaattaaaaataaaattaatcctttaggtagcggtgctggtagtactgatttttatgaacataaagataaaggtggccaatatatttactggagcagcggatttaaaaacttaccatctagctggaatgacagaatttcttctgtaagtacagcgtcaccttctgcaagttattcaacgacactttgggagcacacttcaacacaaggatatggaaaaggcgttttatttaaacacgctgattggtacggtaaaactgctaatttagctgctgattggaacgatattacttcagcgattgaaattaaatagtaataagacatttaatttcttctataaaaattcaaaccactattctctctttcatttagagaatagtggtttatcatatttctatttaagcatgtacagcatgtcctactgcttgcattaacgcttcatgaatcgcctcagataaagttggatgtgctgcaatataatctctcattatatcagcggtaacttctgtatgaatcattacagttccttgtccaatcagttcagtggcatgaggaccaataatagaaatccctacaatttcttggtatttaggttccacaatgacttttactttacccatttgttcgccaataataagcgcttttccgtttgctgtaaaaggaaattctccaatttgtatgtcaccgtactgctctcttgcatctttttctgttaaaccgacactagcaatttctggagctgtataaatacagcgaggtacagcatggtagtttacttttacatcttctccactcgcgtgtaatgctgctgtcgttccttcatggaaggcaacgtgagcaagctgaattccaccgatcacatcaccagctgcgtaaatatgtgatacgttcgtttgcatatgttcgttcacagcaatccctttatttgaaaactgaacccctgctttttctaaatctaattgttgtacacgtggttttcggccgacagaaatgagaacatattccgggttagcttcttggatactaccttcatattcaaatgaagcttgcttcttataattatttaatccttttaaagcagctcctgtaaatatttctacgccatcactttctaatttctctcttaaaatatgtgcgatatcttcatcttcacctggtaataattgcggtgccatttcaacaatcgtaacttttgtcccaaggcgactataaatacttgcaaactcgcatcctattacaccaccgccaacgattaacaatgaagatggtacactctcaagagacatcgcatggctactatttaaaatccattttccatcaaacggagcgaatggtaattctgtaggttcggaaccagctgcgataataaacctctctccatccactacttcttctttatttccttgtacaactcgcacacgatgatccgtttcgaatttcgcttttccttttacaactttaattttatttttcttcattaaatattgtattccttggacgagttgcattacgatttgtgatttccttgcctgtatttgatcccaatcaattgatatacttcctgtattaagcgtaaccccataatcattcgcttttctcacaatgtcatgcacttctgcactttctaacaatgatttcgtcggcatacacccaacatttaaacacgttccgccaaggtcagcttcatcaataagagtgacctcttttccattttgagccgcggtaattgccgctacatatccagctggtccgcctccaattacaactaatttactcattctctcaccttctctttataaaagaattgttataggttcttctaaataatatttaattgtgcgtaaaaatgcagctgctggtgcaccgtctagtacacgatgatcgaatgttaaacttaaaggtaacatactaccttttttaaattttttccctttatatacaggaacatgttcaattgcgccaatacctaaaataccagtctcaggtgtatttaatacaggtgtgaaatattcaataccaaagctacctaaattactaattgtaaatgtcgttccgtgcatatcatcactacttaagctacctgctcgcgccttttgtgccatatccttaatctctttagacaactctactaaagataaattatttgcaaagcgaatagctggaacgactaatcctttttctaatgcgactgctatgcctaaatgcacatgttcaaattgatgaatggcatcatctatataagcgctgttcatttctttatgctctctaagcgctaatacaacagcacgagaaacgaaatccgtaatggttagtttgttttcgtatcgtttttgcacaactttcgctatgtctttatgtaatgcaactaaatctgtaacatctactttcatcgttaacgttaattgcgcactattttgtaagcttgcatgcatacgactcgcaattgcttttctcataccagtaacaggaacgactgtactttcttcttgttcaggtacttctggatttgctactctttcttctagcgcctttaatacatctgcctttgtaatccttccgccaggacctgtaccaactaatgccttgatatccagattttcagactttgcaattttcttcgctacaggtgaaattttaattctttgcttcgctacttctttcccatttggttcttgattttgtacttctatattagatgttttttcttctaccacatgtgtgctttcctgcatttctactttttcatttggtttaccgatgtagcaaattacagtaccaggcggcactccttcatcttcacttacagctatatcaagtaccgtaccatcagctggcgcttcaatttccgtttcaattttttctgaattaatactagcaattagttctccttttgctacattatcgcctgctttaatattccagctcgtaataataccttctttcatcgccatacctaacttcggcattacaacttctacagccatgtgtctctctcccttctcatcgttttattacacatgtaataaagattggtctccaatcatttctgatacagtttcaattactttttctggcgttggcaaatacaacttttcaagtggtggtgagaacggaacaggtgtatgtggtgctgtaattcgtttaataggtgcatctaacaaatcaaaacctttatccgctacaattgccgcaatatctgttgcgatactacatcttggattcgcttcgtcaataacgataagacgatttgttttttcaacagatgataaaatagtatcttcatcaagcggtgataaagatcgtggatcaattacttctacttcaagcccctttttcgataattgctttgcagctgcaagtgctgtatgaacttgttttccgattgcgacaattgttacatcagaaccttctcgtttaatatctgcttttcctaaagaaattgtataatacccttccggcacttcacctttcatattgtaaagtgttttatcttcaaagaagattaccgggtcgtcatcttcaattgccgctaataataagccttttgcgtcatatggagtagaaggaacgacaacttttatacctggaatgctcgtaaataaggcatacaaactttgtgaatgttgtgcagctgcgctaaaacctgcaccgtgcatcgtacgtaccgtaactggcactttcgctttaccaccaaacatatagcggaattttgcaccttggtttaatacttgatcaagacaactaccaataaaatcattaaacattaattcagctatcggacgtaacccagttgcagcagctgccatcgcagctcccatataacccgcttcagaaattggtgtatccaatatacgatttcggccaaactcttgtacaagtcctttcgtaacaccaagaacaccaccccaagcttcatcatcttgcagatgatcaacttgtgcaccgcctgcaacgtcttcacctattaaaattacattttcatcacgacgcattgagattttcatcgcttcattaattgcagttgacatacttactgttctagtcataatttttcaccctcctcttatttgtaagaaacgtatacatcttttaataattcttcatcgtctgggtatggactattttcactaaattcaatggatctttgtactgcatcatctactgctttttccatatcaacaagttcagattccgttaataaaccttcatgaattaaatgcttacggaaattcacaatcgcatctttttcatttaaatgttcttctttttcttctgatgttttatatgtttgcgcttcaccttcaaaatgaccgtaattacgatatgtcatacattcaataattgttggaccatcaccattacgcgcacgttccactgcttctgcagcagctttatatacagctagaagatcttttccatctacttgaacgcctggaatattataagcttttgcacgatccgcaatagaatcacaacttgaagcatattcaaatgtagttgcttcaccgtaaccgttattttctgcaataaaaataactggtaacttccaaatcgccgctaaattaaccccttcatggaatgttccttcattatttgctccgtcaccgaagaaacaaacacttacatcttttgttcctttatatttagctgtcaatgctgaaccgcaagcaagtgggaaacccccgcctacaatgccattagcaccaagcattcctttatctaaatccgcaatatgcatggaaccgcctttacctttacataatcctgtcgctttcccgaaaagttcagccatcataccatttaaatcacaaccttttgcgatacaatgtccatgacctctatgtgtacttgtaatactgtcactatccgttaagtgggcacatacaccaactgctaccgcttcttcacctgcgtataaatgaacgaaacctggcaaaacgccttgcgcgaacaattcatgtaccttatcttcaaacttacgaatctctaacattttttcatacatccaacgagcttgttctttcgtaatttcattccctttactttcagttgtttttaacatgtccagccctcctattttcttgatcatcttttatattgcaagtaccgtgccaaattctaatccttgatttaataagttttctcttttctttcataataaaaaagtggacaaaatgagacatctgtctcgttttgtccacttttgttcacctaatttgagaactattattttattcattatcaaagctccgctgtaattttcggatgtaaataatttggccaatatgatatgcattatgagttgttacattcgctaacacttcccaccactttgcagaaacaggaaatcctactacatcactttcaaccttttcttcatttataagattttgccattgtaacagtttttctagtagtttttcccgtaattcatcgaaagtttgattatctgaaagcataaaacttttgttattatctccaatagcgggtactgcattcacatttgattctttatacctagtttgccacgttgagttccaatacagtaaatgttgtacaatttcagctatactattactctcttcattcggtttccagaaagcttctctctcagatagatctttcactgcatctgaaaatggaatataccaactgggatcgtttgcattcgccaacaattgatccgctaatacatccttcacatggaccatttttcttccctcctgttaaaaagattcatttcatgacaatactcacttctctaaatacgctgagtttgtaagatttcctctttttaagcataaccccatacatatgcacataaagaaaccgaaagcacctaatacataagctaatgcataaccacttctcccaataacccagcccgcaattccaggtccaatcatttgcccaactgcatagaaaacagatataaaactaattgccattgagacatatttcggagatacttgctttgaagctgcaacttgaattaataatagtatacctccgaggctagaaccccaaataattgccgacacgataaaaccagttatatttccaaatataattggagccatatcacctataatagctaataaaagcgcactacataaactcttctttataccaattcgatccgaaataaatccccagacagatgctcctacgattgaaaagatgccagcaattgcataaacagtccccgaaattgatgctgagataccactatcaatcataaaactagtttgatataaatttggaattaaatatacaacaccaacaataaaatacatccatgcaatgatatatagttctttcgttttccataaaaacgatttattactcattttttgctcatcttcagtaacttctggatttttcaaaacaactgaagcgacaaatacaatgatacatgtaataactccaaacaaaaaccatgcaccacgccaactatactcaggaaatgtgcgcactacataaggaacaattattccactaaatagcatacctatacctgcaccgcttaataacagtcccattacagttcctcttttgtctggaaaccaccctaccgttattgacatgagtggtgtatatacaagagcactaccagctccagcacatagcatacaaaaagcaactatccaaaacgaagaaacaaacgctaatcccattaagcttataacgacgaaccaactgcctattaataaaactgattttgcgccaaaacggatagtaaatattccagatgttcctacagttaataaataacctaaaaaaagtatggttcctagcatacctgattgagccgtagataagtgaagtccttcctgcataaatggcagtataattccatatgccatacgggcgaaaccagttgttgttataataagaaagattcctattaatacaaatatccaaaaatgactttcattccgctctttcatttaaattcctccataaaaaattatttccaattggatgttgattgtaattataatgattatgacgaaatacaactaccaaatggtggaggagtttacggtataacggatttttaatacatacgcaaaatttcagaaggtttcattccatatttctttttaaatgactctgaaaaatgactaatattattgtatccaacagcaactgccgtttcggtcacattactagttcccgaacgcaataaaagcattgctctttccattcgctgttctcttaaatatgcaaatgtggacgtgccaaataattctttaaaaccaatttttaatttataatcatttaatcctactattttagctaattctaataatgatgggggtgactccacatgcccatcaacttaagaatttgcactacccccaagtgtcaaaaaacgttattcataaaaaatgcacctccaattgttagactgtgtctaacaattggggtgcacttcaaatgaatagaggactttttccaagtatattctattttaaagttcttacttatcttttactttaaaagatattgctgtaacttctttattaacagttccatcccgtttggacttacaataatcttcccattcgctaacgaaatattgctgtctgaaatatctcctgtaagtgcacaagctcttggagattgatattttcgtaaaataatctgatcctcttctataaacatttcaagagaatctttttctacaattcctaaactccgtcttatttccattggaataacaatacgccccatactatctgctttacgagtaattcctcttgatttcataaaatgccaccctttatatttatctaatattacggtattcattttagcaataaacaacaattaggaatagttcgtattacagtactttttttagaaataaataacaattaggaatagtttatgttaaaattctttcttgtttattcttgatttttaatatatttttccttgatcatttttatatattgttttctttcagttagttcaaatataaataatgctttttttatgtctgttaaaccaacttcattagagtgctgaactttcaataaaattgcacctttttcaaaaaacaattcacctaataagtataaagtattcatatttatggctaattttatacctatttcactatactttattgcttcttcatattgatttgcaaggtgtaaacattttgttaacgtatgaatgagtcttaatttgatttctttttctctaggaaattctatcttattaaaattaattaaactttgttttaatatatttatacttttctcatactcttcattttctgcatgtattatagcaattgaattcattatgcttatttctttttctgataaaaagttagtactacttaaggtttgttttagtgctctatttaaaatgtcaaaagcattacttgttgctccatttacataatatatagcaatcgcttcatgccataataaaaattgtttatcctctttcgattggaaattattatcatttttctctttttttactattttataaagctcattatattgtttttgttttacacaatctctcattacacattttacattttcaatatattttatttttttatttttggttagtgcgaatatataatttggatcaataccaagtctttcagataattgatacaacaatatgctagatggataaataatacctttttctatcttactaatttgactttgtgaacatattccatgacataattcagattgtgacatgttttttttctttctaagttctttaataataataccaagattgcagaattccatctttcctccctcaaatgtaacactttatgagtataagaatattttccaacttttaatgtaatgtaaaattgatatagttacaattactaattatatggatttatagtttcttttacaaacttgtatcacaatacgagaaattattaaaatatggttcactaataatcaatgtgcgttttattcacccccactgattattagtccaccccaggtaggcttttacagggagtccgacttctttgccacatctaaattttgaggtcggagtcttactacccgcaaatagccggattaaaataaatatgatttttcacctttatttcttttaatagtttcttttgatttttatataaataatttcgaaggagcgtattttatgaaaagaatgttgaccgaaagagagttagaagtggctatttatgtagcaaaaggatacacagatgcagaaatttcaaaaaaaatatatgttacccctcgaagaatttcaacgataattaatcatattaaagaaaaatggcatattaattctagagtggaattaggtattttagtttatcattatggttttatagatgcacccttattttcaaataaaaaaattcagctatgtaaaaaggttgtacaatagatagctgaatataacgagtttaaattgcaaataaaaatagaagagcagacaaacttttattatttggtttactccatcactttttaaatttcagacattaatataaaaaggttagagaattaacttctctaacctttttatatacactattaggtttcaaacagtaaagatgccctaatgctaccattgatcctgttccctattcaaccctgtataaacaaaaaaatcagatattaccactattcaaaaccagttacaattctctctttcattttctgtattacttcactgctcaatactttttgaccagcaggaagttttaatatggcagcggcacctttactaaggtatatttcttgatcattattttgatttactaccaatattccttgcccttcaaattcgaaataactaatatcttttgtttcatttgtattattttttattgctttatataatccatataaatctttacttctattttctccgcccgttcgaatcggttcagtatcattcgcaacaattagtccttctggctgctcacccttcataataaaccacagcttttcatttgttggtaatagtaaattcttaaattcagagctatttaaaatttgctgtgctggaattgtttcatagattggtaacgaaaatggagatgttgttattttttcaaaacttaaattttcagaagaacttcccttactatattgataatcttttaatgcgatcgattgtactgattcacttttattttttgatgcataactaattttactagcgaaaataataacggtcattaagcacatgcacagtatcacaagcttaagtagttttcccatttatgaacccccgcttttaatattattagtttgcatggatattataaacagtttcactccaccaaaaattattattgttatggaacgtactgaaattatgattataatgatcaccataccaagggtccatgtatgttatataatctgttccatttgtccctttataaaatccatcaagtactagaaagtgtccgatgttagctccattttgccacataatgagtgcaatcatcggctgattactattaatttgacttttgaaccaatcataagattttgctccagaacttatagctgagctaacaccatatcccgataatccatattgtatttcacgtgaagttgcaggattattatatgatccacccttaacatacctaacgtactgatcttgtgaaggagttttcccaaaataatttaaaactgaaaccgaagtgcctgcccaacaccaatttgatctttcttgtaatatgttaggtacagataatttacggtctgttggtgtacttgggggatttccattaatatacgctgacgttacatatactttttttccatctttaaaataataaaaccaacgattatctaaatttcctgtccagtaatctttaaccgcttcaccatactcccatcctttaaaagatacttttgtatttccgggaatcacatctacaatatttgcatttaaactttttgcctctctaacatttacattcaatggagctgttgttcctgaaaattcaacttcttctgctattattttctgaacaccaataaaactaaatgtgaaaaacaataaaaacatacaaacaataaaatgatttcttcccttcatttctccaccccttcatcagtactaaaaaacatcaacaattcatccttattaattgttcaagcttaatattacatactaacgaaaaatgacttctcataaagtgaaactttaatcagtagtggttttattcatcccccactgattattagttgaaccaatcgggctgcccggcaaatagtgggataaattccaatacaaaaaaggagcctataaatttttataggctcctttttatttcgtcgttattacttagctaattctttcgtacccttcattacatcaatgaagaatccccagttattcactacagaagagatactgatatgttcatctggagtgtggacgttgaaaatgtctggtccgaatgaaattgcatctaattcaggcatcttttgaacgaatgcgctacactcaatccccgcatgtacagcgaagatttcaatttctttattgtatttttcttgatgtactttttcaaataaattacgaatttgtgagtttggattgtatggccattctggatactctgactctatttcaaatgtagcaccaactaattcagcaatatatttgatttcttctgcaacatgttgttttaaactacttacagaacttcgcacttcgttacgtaatttaatttcatcttgcaacgtttcaataacgcctaaatttgttgaactttctacaagacctttaatatccatgctcatactttgaatgccatttggaattaagaataatgatgaaataagctgcttttgtgtctctttagcaaatactttttcaactttttcatccaattttgtcagtgtaacatgaacatctggatcaacagcacgcatttcttcttgtaatacacgtgtccatgattctagtttttcttctacttgtcctacatcttctgtacgaattaaaattgtagctacactttcacgcggaattgcattcgtttttaatccgccgtgaacttcacttatgtaaaactccgtatgtactgataaatcacgtaatactcgtcctaatactttgttcgcattaccgcgttgtttatcaatttccataccagaatggccgccttttagaccaccaacatatatacggtatgcatccatattcgctggcgtttcatcccaaattacttgaattgtttcaacagctttcgcaccacctgcactacttacaagtaatttatgatcttcttcagaatcaatatttataaatatctttccttcaaaatgatttggatcaatagcaaaagctccgcccattgtcgtttcttcttcagtagtgataacgacttcaagtgctggatgcggaatttcttttgaatctaataaagctaatgcatacgcaactgcaataccattatcagcacctaaagttgtttgatttgcatataacatgtccccaatgattcgtaattcaattggatctttttcaaaatcatgtactgttgcttgatttttttcgcaaaccatatccatatgaccttgaataataatagctggtacattttcataaccagctgttgcttcttttttaataatgacatttaatgcttcatcttgaatgacttctaagttacgctcttttgcaaagcccactaaataatcactaatttccttttcattacctgatcctctaggaatctttgaaatttctgcaaaatgaaaaaatacagggtgctttgttaattgttctaaagtagaatacatttttcaagctcctctcaaaatgaaaaaataatatgtaagtctcatatcattataccatgattcattattttatctttcttttaacttttattgttcattttatgtacaacactcttacaacattgtaagcgcgttgtaatctacatcgatttttctcatttaataatagtcgtatactttctaaagaaacacattaaaggagataaagaaaatgaaaaagtttttagcaattattacactatgtttattattttttagttttactattggctgtgagagagcgtcactaaatagaattggtaaagatgtatattacatgcagataaaaggcgaaggaactatcgaaaaagtagatcatagaaacttacgaaactatacgctgtccgcatatgatgaagatggcgtcaaaaaacaaattacatttagaagtacaaaaaaagaaaacaatcataaattaaatgaagacgcgtttttacgcctttatgtagatcaagatgataatagcaacaatgaaatatcatcaattgaagtaaagtcctatgaagagattcagaaaacagatttacctaaaaaagtaaaagataagtttactattaaataaaaaacaaaagaaaatgctctatgcattttcttttgttcttttcacctgtatatattttgaactactattattcatcagtttctctaaccgatttatattctccgttaatgcacctttcacaagagagaaatctgtattggattcttcttttttttctttaaaaaacgaagacttttgtacattgacttcagccatctcttctcccccttttcaaaaagatacaaccttttatttatattatatagcaaatgtagaaagagtgtacacttatgattttctttttaattcttcttctaattcttctacttgctgcaacgtatccccttttattaaagagaaatctgttgtatcttcgttatcttctttaaaaaaatcattgtcataatcttttaccactacaatcacctctacatgctagtgtaggaatgattgtccaattttattcaactttgtcggattttgtttttaatttatgtatagaagaaaaggacagaaaaagattctgtccttatttactaaaataactatgatgtattgttaaattatatacattttcaaaatcccgatcttgcaggttatttttctttccatcaataacaatgaaaacgtcacttactatttttgctggtataatcccgacattttctacttgcaccgctttctgctcattcaattgctcgatatgttctaacgggacgataatactaaattgtgagcgaataccacgaaagtttgtatttaattccttcgcagcttcaaaaacaacaattttcgcgccaatcttttccccatatgaatctaaaaatgcatttaagctctttgtatattcctcttccgtatgccattccatcgtaccgaatactgctggattaacattttgaataattgtcgtgtatatttctcctcttgctttagatgcaattaatgatcgttttatggattgaactgtcttgccaatatcgctaaatttcgcaccccatatttctgaaatattaggcgttaaaatgaacgcaatatcaacaaaaataaccattgcagtaaacattaaaagatttttccagagggttaaatcgattccttttatcatgaaatacacggtgacagatatgataaacaaaccataccaagtctttctaatacgttgcttcttctcctcgtacaactcttcatttttccaataaaagaaaacaaggactacaaagacaatcgctaaaacaaataagccaattcgaatgttagagatcattaatcacatcaccctccattcaaaaactactcacgatatcattacatgcgcaagctgctctctttatgacaaaagacgtggacaagcttctaaaattagctacatcgcatatatattagaaggtaccacgtcttttatcctgctatttgtgggcagtaagaccccactgattaaaatttcactttaccatgagtctatattgtatatgtagacaagcattcatttcaaattttcgtattaaaaagaaatatgtttcggaatttccccttcaggtacttctccatccatacttaaataataatgacgaatcggacgtaagttttcgtctaattcataaacaagcggaatgctagttggaatatttaatgaaactacaccatcacttgaaaggttgtctaaatattttactagcgagcgaattgtgttaccgtgtgatgaaataattactttattaccactttttaatgtcggcgcaatttctgaatgccaataagcaagtactctcttctccgtatcctctaaacattcagttaatggaaattcaccttttttgagtgttttatatcttggatcggtcgcttcatatcgaggatcgtcttcagtaagagccggtggtcttacatcaacacttcttctccaaatatgaacttgctcctcaccatacttttgagcagtttcatctttattcagcccttgcaatgcaccataatgtctttcatttagcttccaagatttatgtattggaacccaagtaagatccatctcatgaagtacaatccataacgtccgaattgcgcgttttaatacagatgtataagccacatcaaaagtatatccgtttttctttaatattgctcctgcttctctcgcttcacttaatccattctctgatagatcaacatctgtccatccagtaaagcgattttcaagattccataagctttgtccgtgacgaataagtacaagttttatcattataattcccctttcggaaatgtgaattttattgttccattgcgtacacgtataaagtatctagtaatgtatctttttatccattcactctatgaccaatcgatagttgccaaatgtatggataaaatttgttctttttcaaacgataaaaacagaagttttttcattatttttgatcgactggtatttcacgtttcgatatccaagcatcaaaacctgatcggctatttgccatttcattcataacttggtgccaattgtcctcacatgattcaccaaattttgaaaaaatagcacccatttgttgtctttgtacatcactcagttttttctctaaatctgtacctttttctgttaaagacaactgtttcacacgtcgatcatgcatagcttcattactctcaattaagcccttttccacaagttgacgtagcggtccgtggagcgcttgcttacttatttctaatagtgataataactcatttacacttatccctggaaaacgtgcgataaaaaataaaattcgatgatgtactcgttgaatgccatattcttttataatttcatctggcttttcagtaaatgttttatatgcaaaataaaataatgctaatgcctcattcatctgttcttctttatgttgtgtcatctactttccccctgtatgtaaattataccacaatctagtaatgaatattttaatcaacgcattagaacttgttcagtctattgaaacattcattgcataattaggagatgattcatttgaaaaaacaatatactgtaagtacatatttattggatagactacacgaattaggaattgaacatatatttggggttcctggtgattataatcttgcctttttagatgatgtggtagcacataaaaatttaaagtggattggcaattgtaatgaattaaatgctgcatatgcagcagatgggtacgctcgcataaaaggaatcgccgctcttattactactttcggtgttggagaattaagcgctattaacggtattgctggctcatatgcggaaaacgtgccagttataaaaattacaggtacgccaccaacaaaagtaatggaaaatggagcaatcgtccatcatacgttaggagatggaaagttcgatcacttttccaatatgtatcgagaaatcactatagcacaaacaaatgtaacacctgagcatgctgctgaggaaattgaccgtgttttacgtgcatgttggaatgaaaaacgccctgttcatattaatttgccgattgatgtgtataataaaccaattaataaacctacagaaccaattttatataaaccgattttaagtaataaagaaacgctggataaaatgcttctacatgccacttcaataataaataacgccaaaaaacctgtaattttagctgattttgaagtagatcgatttcatgctaaagaaagtttacatcaattcgtagaaaaaactgggtttcccatcgcgacgttcagtatgggaaaaggaatattcccagaaaaacaccctcaatttataggtgtttatactggtgatgtaagttctccgtacttgcgaaaaagaattgatgaatctgattgtattattagtattggcgtgaagttaactgatactattacaggcggcttcacacaaggttttacaaaagaacaagttatagaaatccatccctacactgtgaaaattatagataaaaaatacggtccagttgtaatgcaggatgttttacaacatttaagtgattcaattgagcatcgtaataaagatacccttgacgttaagccatttattttagaaacatcaccttttactgaagagttcaatccaaaagcacaaatggtcacacaaaaacgtttttggcagcaaatgtaccatttcttacaagaaaacgacgtcttaattgtagagcaaggaacacctttctttggtagtgctgctatccctctacctaataacactgcatatgtaggacaaccattatggggatctatcggatatacactgcccgctctacttggtacacagctcgccaatttatcacggcgcaacattttaattattggtgatggttctttccaagtaactgcccaagagttatcaactatactacgtcaaaatttaaaaccgattatatttttaatcaataacaacggatacactgttgaacgtgccattcacggacaaaaccaactttataatgacatacagatgtgggattacaataaactatcaatgatatttggatcagaagaaaaaagtctaacatttaaagtagaaaatgaagcagaattagcagaaaccttagtaaatataatttttaataagaatcaacttatctttattgaagttataatgagccaaagcgatcaacctgaattgttagctaaactcgggaaaagattcggtcagcaaaattcttaatataaaagcataacctaattatacaactagtagtgtaaaacttgttttgagaatagtttcgacactcaaaatacataaggaaaaggatggaaagtaccatccttttctattttaagagccttcttcgactaacgccccgtgcgacaagcaaaaattcttaatccatctttaattttatagcttttgtcgcaataaatgttttaatatgcttatctaatatccttgttccaccaaaatcatcctcataaaaacctgttatagcaaaaccagcatcaatttggccttggatttggtcttctaaagtatgcgcatattctattgtttgatttgaatcgatgtaatcttgaacttcatcctctggtaaataatccaatgttgatgaaggaattgaatgtttaacatccagaatacctttttgctcttggttatcatcaaaaatccatagtaacggatttgtaaatccagcaataagaacacctttattctttaaaaccctagaaacttcattccatacaagatgaacatctttgacaaacaaattagacacaggatttacaacaatatcaaaatattcttcctcaaaatcactaaggtctgacatatctccttgtacggtttttaaagttaaaccatcccgttttgctaccttttcatcttgttccaattgcttcttagatatatcagtaactgttacatctgctccagcagcagatagaactggtgcttgttgtccgccacctgatgctaagcaaagtatctttaatccatctaatgactttggaaaccattctctaggaactgatttttccgtagtgactgtaatctcccattcacctgatttgcttttctcaataatctcgctacttacagactgcgtgtatctagaaccttcttccaccttcttatcccatgcattactgttttgttgtgtagtatccattacaattattcctcctaacaatctagttgcattttaagtgtaaacttattaactatttatgctttcctttttctattaacccgcctgatagttcatacatagttgtctatatttatattaacagataaatgctaataatcgctaaaaattctaaaaagacaaaaaattatacatctattccattcatttaaaataatcgtagaattggtaagttttaaacaactcacttccacataaaaatagcattccaaatctgttgacagttggaacgcttttttatgttatttcatttttcaagcttttaactaaatccattaaacaaataagctacgctttttctttttttattcagcaagagttaactgccaagatacaccatacttatcatttaaccagccaaactttttactaaacggataagaacctaaaggcataagaatcgctccatcctgcgctagtttatgaaagaccgtttcaatttcttcttctgtctcacaagttacataaagagacatagctggagtgaatgtaaaattatgatttacataactatcaatacacataaactcttggccatttagcgtaaaagttgcatgaattacagttccctctttaccaggtccattttcatcgtagcgagaaatacttacaatttctgattgatcaaatagtgacgtataaaaattcattgcttcctcagctttgccctcaaacattaaaaatgtagtaattttttgatttgcgttactcatatggagacagccccttgttatgtatttatgtaaaacatacgccaacaaaaccaaacgtacgttccttttaatatattgtctataaaaacgatgagtttgtcaattatctactttattatttcttcttaaataatgctgtccaaagaaatgattctccaaacatttctttcggttgtttcatttgtttcattcttctaatcacaattacctcaaattctttaaatatctctcttaacttttcttccgagtatgcaagaccaccttgtagactccaccctctatatacgtcccaatctgttatttccgatccatttcgctcatctaaatcacctgccgcaaaacatgttaatccgaaataaccacccgattttaatgagtttttaattaaatccacataatttattcttctatgcggtggaatgtgatgcaaacagcccgaatcgtatacaaaatcaaattcgttttgaacctctaaattaaaaattgaatcacaaataaaatgaattgctacctcttttgccaatgccctttctttagcccaattaatgccttctacagataaatccactgctgttacatcaaatccttgagtcgctaaataaatggcatttctacctggaccacatccaagttctaatactttcccttttgaaactctctctttttgtatatacgaaactaggttctcatctggaacattttcaaaaaatggaacatccttttctctattctcataaaattcattccaaaatggttctgcaggtcttaataatgaatcaagcatttttaaaatgtcttcttgtgtgtgtaacgtttcatttttcattaatacccctccacaaattaatagtcagaaaattattatatatctttttgaactttcaaacaaagaaaaaactcctacattcaataggagtttttccctttaaaatccaagtatagctaaccattttaacaacttctcttctcatactttcaaatgatcatgttcctatttacccatccgtatttcactaacaatttctccgtctgccaaaaaaagaactctttctgttttcaccgctacctttacaacatgagtcacttaagaagaatactttgctgaaaaataaagccgatttcgttaaggcatatttttgctaacgcctcttctttcatacatgatatttcatacaatcatacttttctaataaaataacgtttttgttcacttttttgatacatttacgaaacattcatgtgttatcttcattaagttcttttctttttataatgtcgtgtgagatataccaacagaggaagccctagatcccctaatcctagggcttttttataagaattttatacattttattatttccactaactctttaaattgtatatacataatataaaattttcatgttgttatattttttgatggcctcttatctttccttaaaaggcttttgtttcaaataacgcttttgtttaatttatatttaaaaagttccttttcataaagacttcccttatatgctatactcattcttaaataattgtataaggaatgttaaaaatggatgatagatcgtcaagacaatggaaattgcgacaaaagttaagagcactgaaaaccaaaaacaacaatgacacaaaccctttgtttagtgaatgccttgaatccctaggaaacgaaactctcattttctcccaagaaaaaagccagcagattgctactattttaatgaattcatttcctataactgtctcgggaagaatagattgggaacagatagataatcaattcatagcttcgaacaaagaacaactaatttcccttattagagcaaaccaactagattttgacgaacagatttttataatatgggataactatgaaatccctgtagtaagtacaaatcttgataaagtattccaatcactagttgacgttgatgcagtcagtttttattactggctattagacaaagaatatagattcgtaattgaaataaatgatgaagaattgattaggattgggtttcgctaatactctaagcatatgaagctagttcccttcatttcttaatattttcttcgtcaccaccgctattattatcattatgaaactaatagcaaatataggtaaataaattttcgtactgaatccttcaaacataaaaccatatacgacttgcccaattggtgccatacattgagataccgctgttataaatgccatcacttttcctagattttcatttggtgttttcttttggactacagtaatcacataaatggatacaattgtcataatcattgcgattagaagagaagaaagtataaagaggataaatggtggatagtatcctaaattaagaataaacggtgtaactgatagtgccactggcattactaataaagctatgataagcatccaattatataatgttttcatctgtaactttttagcaaagaaaccgattgacaatgcccctaatatggttgcaaaatcaattaatcccattccaattccatacatcgtatcgctactctgcatagttactcgtaacataataggtcctccaacaacaaataacggtgtcaaaattaagtttagtaaagttgcaagtaacatagccttcaaaataaaaggttgctttaaaacataaagaaaaccttttttcatatcttttacaattgtcggtatgatatggctttcttgcgctctttttataaaaggtattgtaataaacatttctaaaattgcagataaaaagaaagcaagacaacttgttattacgagcattttcaaaccaattatgccatataatattcctcctagtacaggtgcaactatattagataatgcttgcacaccatttatgataccgtttgcttgttctaactttttctctggaactaattgcggaatacttgccataacaactggtgagtacattgcactaatgactgctagtaaaaacataattgctccaatcaataaaatagataccgattcagttaataacaaaactataaaacttaatacaatagcagcgtttataaaatccaaaatgaccattacattacggcggttgaaacgatctgctatcgctccgccaagaggagctaacaaaaacgggatactcgttatggcatataaccctgcaaatatatcggcacgtcctgttatatctagcacatataaagacagtgcaaaacgtaatagtgttgaacctaaaatagtaataatttgaccacttaccattaagtgaaaatctttcaaggaagattgaatacttgctggcatcttcatcacatccttcatttagtctagaccgactgccggtctataacacccaaacagaaaaaagctatttctgtttcattaaaacctcgatcatataatcaaaggacccttctttcgctccaacagatacttccatcattttaatataagccttagctcttctcatcatttcttccggtttccactggaataaaccatcatcaaatatgacttgtgctgaagagagtaataattcaattgtttcttgtgggtatggagtagaaaatatgccttcttctattccttgctctaaaacttccgttaatacaggagataaatgtataatggattgcactaaacttttctgatgcatttctgcattatttggttgatggaattgttcaatcattttttctttgacatctcctgattttggtgattgttccattaaaattttaaataacttatctaaaacggggatatcgggattggagacaatccttttcgccttagtgacatcctctttaataatcctcataatgatttcatccattacttcctccttcgacttaaaataatgataaaacgtcccctttgctataccaatttcttttaaaatatcattcacggttgttttcgtataacctttcgtaagaaacaaacgctcagctgtttctaaaatttcctttctacgctcctcatactcctttacaattcgcattcaagttctccttcccatcagaccgactgtcggtctattaaaattatatgtttagtttgcaaaaagtttcctattatcgtacatatacaacaccatactttctatttcctttataaatttttattttttaacgtccgctcaatttgtttaaaacgtatctcatgtttcttatcgtcacctttcattttaggaaaagaacgatgcctccgttcgatctatgtacttatcaatggagtattttgttgagttccaatatgtaatattgcatatttcgtacttttaatttttgtatatgtaataatttatttataaaaatataaattattaataagggtgatttatatgagcaagttccgaaagaagattattaaatatttgcaaacattttggggatgcttagcatttggagtattaatgtttgctatcttcttaattacggatttaacagatgcatctttaaatacattaggctggagagactggctaggttctgtagcaggcgcaaccattttatctgttgggatgtttactttaaataaattgaatttaaaataaatattcggtcaatactgaatttgggctgtatgccaacattcatttaaagtagtcttctctgtatctccttgtattgagcagttagcttttgctagccgctcttttattttgttccggttcttgcctcttaaagaactctttatctactttcccccaataagtacacatatctattctccattgctacaaaatgaaatctttattttgttttacgcgtcgcttcttcaatcagccaagatacaatattaaaatcattagtttcaccctttaaagatgttccgttccaaaagcattctttcatcacttcaagtaatttttcaacagcttcaattcatctcatattaattttccctttctcccaaataactattttgttttattaattaactgattaataaaacaaacacctttattaaacattccatgtttcttcaccccttgaatatttttcaaataaaaatacatactattttcaagccgccgtgtccatggctaatacctctttcttttgatgtatatttttttagaaatcgaaaataataccaacaagctgtttgaactagcagcttcactcttctcgcaatggggatgcaaattatcacaattagctaactcattgaactcactggcagacaaccaaaatcgttgtctgctttttgtatgagatttttcgttttacatatactacttttgaacctgcagaccaatacgagccattttggtgcttgggatttcccttccggggataagtatcttttacttatcccttttttgtatagacacgtatatttagggtaaaactaattacaagcagattttctgtttatgcgtagttctaaacaagattactttttctcctattaaaggacggcaggtacgactgctagtccttttttcttatttcgcatattatcactaaattaccttcatcgtcgtcgtaagcaatttccccataaggatggcagtggtgcttctcgagttcctcatcgatcaaaactaacaaattagttttccagtttccaacgatcgtacaccaatacgagtttaatccttcataaacttctcttgttctatttcaataattgcggaatgtataatgaaaatactcgctcgcttcaataccttttcttttaaccaaagtgttctgctgaatgatagtaatacccttgcactaatggttttggactataaaattccctttataaatttcaaatgcggtgaatgaaattttgtttttttcttgccatcatccttgttgtatacaaacaaaaaaagagccacaatattttgcgactcttttacaattataaccatttaacggccacgtctttgctgaccttgctttgtactaccttttttattacttggcttattaaatgatcggttattttcatttctagaactatttctcgaactatttcttgaatcacttcttgagctatttcttgaatcacgtcttgattcacttcttgaaccttcgcggctatctctttgacgattttgacctgatttcttcggagccagctttggtaccggttttccattttcatctacacgttttatcttcggttgttcgattatttctctttgtattggtgcaccaagcgttttttcaatttcttctaaatgtttttcatctttcgctgcaacgaacgtaattgcaagacctgatccacctgcacgtcctgttcggccaatacggtgaatataactttctacatcttcagggatgtcaaagttaaatacgtgcgttacaccatctacatcaagtccacgagctgctacatccgttgcgattaagtactgaattttagcttcgcggaaactcttcataactctttcacgtttcgcttgaggtatatcaccatgaagttcagcacaattataacctagtccttttaaattatcatacagtttacttactctaagttttgtacggcagaaaataacagctaaaaatggctgatcacgatccataacaaaacgaagtgcatctggctttgcacggtctgtcgtctcaatgacacgctgctcaattgtatcaaccgttacttcttcactttgtacttgaatcatttgcggttcatccatataacgcttcgccaattttttaatatcttttggcatcgttgctgagaataacatcgtttgtttactacctggtgtctcatctaaaatatcttcaatatcatataagaaaccaaaataaagcatttgatccgcttcatctagtacaatcgttgaaagattacttaaatcaattgtttcacggcgtatatgatctaataatcgtcctggtgttgcaacaacaatatgtgtattaccttttaattttctcaattgttgtgctacatcttgcccaccataaatcgctagtacattaatatcttctctttgaacaagcatttttttaatttcagttgtaatttgcagggctagttcccttgttggtgcaacaattaaagcctgaacatcactagactctgaatcgattttttctaaaatcggtaacacgaatgctaacgttttacccgtacctgtttttgcctgcccaataatatctttaccagacataataacaggaattgcctgctcttgaattggtgttgcttctgtaattccattttcacgtaatgtatgattaaaagtttcactaattcctaattctaaaaaatttttcaaatagaccacttcttttccttatttttcacattagctttcattgtaccatttgtttcgccaaatatgaaaaataaaaaaattcttatcttctttttttatattcatcctgtactagatgaacaaattctttttgctttttctcagattttattaatgcttccatatttatagaagtcaaaatataccttttaatttttctattactccaaattaaacttgtatacttcagatcttcatgtagatttcgaaaccactctaattcacttaattttgcgatatgatgtttcaatttcatgtcatttcgaggataaaataaaatgatatctgctattacatcaaataacgaacccatcttctcccccctatactcttgctcaaattatatatattcttctttacatatatatttcaattttaccgaaatataatgttactgatttggttgaaatcgcaaaatatatgaactaaaaaccaatcttttcgatttaggaaagaccgattttcattaatttatacagtaagctttcctccatgatagcaataatactgtgttgctttaaaacttttaatcctatttaaagactgtttcgctttttctatatctaaacaaaaattcggattagctattactaacccacgattctcttgaacagccgcatctcccgtaattacacaatctaaattcggaaaatataatgaaatatgccccgaagtatgtcctggcgtcgctactatttgacattcattattcaaaatcatttgaccatcatgcactttttcatcgacggaaatatgttttatattttttaactgttgtataaaccatttaccaaattctttttcttcatttggcatacgttctaacatttcttcagcttgaactaacctctctgattttatatcaccactaatatagttagattcaatttcactagcaataacattaatttgaggatatttcactttaaaatcgtataaaggccctatatgatcatcatcataatgagtaataattatattctttaagttttttatctcatatccatgttttaatattgcattttcaattaaaggtaaaaaacttggatatcctgtatcgactaacgttaattcattatgtaatataattaaacttggataaatacattgtttttgcccgttaaattcgaattcaattggtagttctattattttcatttttcttcccccataccgcctattcaatatttaataataaccacttcgtccacatacattttactatacatattaaaaaattttttatcagtattttgttttaagttttttattagttaattctatttttaaatgtggataccaaagttattttatatctatttctcatatgtgttagcaagttcgtctgtaaaatcatagacagggttttcactcttaacctaagctgttactttttataaatgaattttacccttattggacaagtatccgtttcgtaattttcatatgtaataaaagagacatctccttaaattagaaatgtctcttttaaattaatagaacaaattcagttgtatttcttttttgtgaaaagttttttcatcaataaattatacattttcagtgcttgtactacaacttgtcgagtataaaattggtataccacatatagcatcattcattacatcacgaaaaacttttgcagcgacttctgtgaaagtttggcatagattagaaatatcatcattaaaaaactgaatcacttttgcagcaaaaaccggaaaaacaacattcgctccacctgggaactgcggctgcacaacaacttgctcaaaatacaagttgctttctaaagctacttgaaaaaggtgtgcaatttcaaaagcatctaaaggacaaggaattgggtttacaattccatccccaataacactaacaacaatagttacatttacattgccaaattgcactgtaggtttaagaagtgtagctaatgcaatcgctttttcaaaatccgtagtttgtactaaaataataaaatttccatcagtcggtattagcggacctactgttacagttggatcagcccctaccgaatttctgagttcgttaaaatatgtgatccatggcggtgaaagttgaggttgtacacgctcgtccattctttttccacctccttatacaattctcaatactataatatgaaaaaattctaatagcgcattagatatatttattatttttcatagcattttcgtatcaatctgagaattttgtttgtttagaaaaccttttagaaacatttaaccatttattgtatgtcaataatatagtagtgaaaaatttacaggtgaaggatatagaaagaacaaggttgctagttcattaattgtaaaaatatgacgttttagatgaataagctttatttgcagtaatatacctttattattatgtaccttatattgcagcgattcactaataagacgtacaatccctatccttttagaagtaattaaaaccttcggtgaaatcttctttagatagataccatttgcaaattgtttaatttaacaaatactacttgcatactatgtaatgaaacactgtgaatcattgtataatccacattatattattttgaacaggtaatcccctatttttatggaaatatataattaagaaaaacaataaaattgattaatctctcacttctttgtccatccttttaaaaaatctatgtttttgtaaaaggagtgtttatatggagaaacagacactttggaaaaagttcaaaaaaagctctgtaaacctcggtaaatctagcgtatatgaaagtattattttattctacacaatgaaaaagaaagaattacctactaaggcgaaattcataatattagccgctttatcttattacgtattaacaatcgatttcattccagatatagctgctattattgggattggcttattagatgatgttttagcaatcgctgtagcgcataaatacgttatgagacacgcagatgctgaaattcgagaaaagagcaaagtaaagatggagtcattatttacttcagcacaagcataatgaaattatctagtcatttacctacctttttactttcaaataaagctaactgtaattaatgatagttccacctcactgaatattacccttcaccatgagagcatagcagaataaatccctaaacaaaagcatttctcttagctctcaaaccgtaaacaaatcgggaatcagcacttgttcctaagttctgactcccttttatttgttcttatatctatctgttatacagttgcatgcattcccttatacaaaactgccattgccgctactataagaatcatacccataaaagcaggtacggcatgaccaagtgatacatagatttgtcctccaataatcggaccaatcattcttgctaaagcttgaatagattggcttccaccttgaatccttccttgttcattagaactgacagactttgaaagcatcccgttgaatgaaggcccgaaaattgaatccccaaaaccaaacattagcattccaacgataagtagtggagagagtgaaaatacagctgatgctgcaataaaactgtatcctataatctccaaaaccatcccaagaattgctatttgtttatcactaagcttaattaaaagctttggcattataaaactttgtgaaacaatgtcttgaaagcccaaaattgaaaacataagtccgattaatgcaggtttccaactgaaagtatccattgtaaattgcgtgaaaattgcttgtaaagatccgttaggtatccaaagtaaaaacgctgagataagtaaccattttaaattttttatggaaagtatatttgctagctgtgcaaaaggatttaaccttacaaaagtaatctcttttaacctgttatttttgtcaaggctctcaggcatgtatttcataccatataaaacatttaataaagttatgaacgctccaaagtataaaggtacagaatgaccaaactttgcaagtaagcccccaagagttggtccaataatagttcccgcacctacaactgcactcacccatccaaagtatttcgttctctgctctttcggaatgatatctgcaaaatatgcgaagatagtacttatgctcccacctgttataccttctattatccgtccagcaaataatacccataaagctcctcctatgccaaaaactaagtacccaattgcagaaccaaataagcatattaaaagtaatggacgacggccatacttatcgcttaaagccccgagtgctggagcagctaaaaacacgcaggccgcatatacggaagttagtagtgtaacaaccaatgcttgttcttccggattgcttgtatatggctgtactaagaatgggactacaggcataatgatactgaaacctataccacaaagaaatacagaaataagtccgaatagtaaagcatgtttatctatgcttttttcagtttccctttcattttgtgatctaaatatagacatttaacttctctccttaaaatgttttgttgctttgtcaacaaaatgataactctgttttgttgattagtcaacaaagataaaataataaaaaagcagcctattctcatattagagtaaggctgccattttattattaaaatgtattacgatttaatatgtataccttgtttctttatttctgcatccaaatgtctactatacttttccacaaagctaattatactgtcgaattcttcttcagttacttgctcaaatacagctttatcccgctcttgaaactctttgtgcagatcttcatggattttataaatttctttcccttgttcggtaagcttaaaataaatttctttcttattttctgacttttggtaactttcaacaaggcctttttgtatgagcttcttagtcattctacttatagcaccgcgagtcacataaaaagcctctgcgagttgcgtcacgttagaatctgcattgttttcaatatattcaatacagtggacttcagaagacttaaaacctttaagaccttcttccatcttatctttattaagccaaaccagtttattatataattccctgaaaccgttcatgacctgttcttctttattcatgatctgccctcctcaccgctcattagcacattaaaactattatattaaatttctgcttacatttcgacaatattgaaataattattgtaacattaaagatatgtgtaaaaataggcgcttaaataaaataatttttaaacagcaaattttgcaagtttattgctacttacagtaaacagtagacaaaaagtaagagctaagactatttctcttagctcttctttcataaaactatttcacttcattagcgacaaaaaagtgctcacatacacttgatatgcgctgtaagtctacgttcccaccagatataaccgctactactttttttccttttatatagctatcaacttttcctgcaagaagtgcagcagttgctaatgcacctgcaccttctacaacagctttcccacgttgtaataaatctttcatcgctacttccagctctttttctgatacagttacaatatcatctactaattcttttacaatttcaaatgttaattcacctggtattttaactgcgcaaccatctgcaatagtaggcgcctcataatgttctacgattgctcctttatcgtaagatgccttcattccatgaacattatctgcttggacaccaattatattaatggatggattaaaagatttcaatgctacagcaatgccagaaataattccgcctccaccaattggtacaatgacagtatctacatcccacatatcatcaagaatgtctaatcctattgtaccttgaccagccattacctctacatcatcatatggatgtaagtatgtttcacctgtttcccttataatttcttcacattttacctttgcatcatcaaaggtttcaccatgtaaaatcacttcagatccatatccttttgttgcttcaactttcgcctgcggtgcagaaattggcataacaattttactcttaataccgagtaaatgagcagataatgcaactccttgtgcatgattacctgctgaacatgcaattacacctctttctttttcttgatccgtgagccgcgacattttattaaatgcgccacggaatttaaaagaacccgttaattgcatattttctaatttcaaatgaatttctccgcccgttttactagtcaaataaaaagattttactaatggcgttttacgagcatttctatctagaattttgtgagcttttttaatatcgtctatatgtaatggtagttttctagttatcatactgacacctcttccaaagttctatttctaagttttcgtaagtcgtagctcctttatacgaaaagagaaaatctttatatatgtaccccactctgaaataaacatatttgcaaacaatttaacatcctcttcatatcgcgttctttataatgatttaaacatgcaatttgaatccaattattcttttgtaaataagatgactcataatgaacaacgtatccttgtaatgctaatgcatcgcctactactttagaagaatgctcttcgctcaatacaatagtaagtataattggtgcggcgtgttctttagttgaaacaagctttaaacccatatcagtaataacttcttcaacataatcgtatgtctctttaatttttacaaatgccttttcatcttcaaatctcttcaacgcttcttgcaatgcataaattaaattccatgattgtgagtatggaatgctttcattttcttcatacatgccaatgtccatataggccggcacagcctcgtttatttttacaatgtggttatgaaaaacgaaagaaattcctgtatatgatttaatcgctttaccgctaacaccacttgcaaaatacacatccttcaagtctaatggtattgctccaattgaacttatacaatctacacatagtttcatttgattctcgttacaaagagtatttagctcgtctaaatcgtttaacattccagtagatgtttcatgatgaacaaaccaaagccattcataatttccagttattattatttcttctaattcgttataaataaacggctctcccatttcttttttatacgtatcaaaatgtaattgtgctcgttttgcatgtccaactaatctatttccaaattctccatttgttaatattagtcctttcccttttaaagaacgtaactgtaaagcaatcgcatcatttgctaacgtccctgttcctaacataagctgtacatgttttgcttttgtcatgtgaagtaaccgttttttcacattgtccattgtcacttgaaatgacttagagcgatgcgaaataggccgcgtagaaaatgcctttcgaacattctcttcaatatctactggaccaggtaaaaacgtatattctttcgtcataatccctccaacactcgactcttcaaacatagcaggagtaacatacattggctggaaggctgcttcttctgtaccaactaacgtatgaaaagatttgaatcccatttgctcatataaaggtagttcacgtgttgttgcagaaatgagtgctaattcatatccatttagaagcaaataacgatgtagaaaacgaattaatcctaacaacgctcttccatttctatattcacgttctactgaaagtaaacgaatttcatacactttttctccatgctcttgcaaataaatatctaaatttgagattttataatctaacgagaatggtcgttttccccgcactgcgaccatacctactaatctatcctcatctaaacaaattaaatatgtattttcatcatgaaagcgatctatacgaacacgctctttcgtttcttcatgttgcggaatttcttctacaaatgttttataattcaatttatgtatacgttcaaattcccgatcttgatcagcaactttataaattaaccccatggcttatctcctttatgtatttaataaaaattataagtggagatttactccacttattaaaatttcgtttcagtctcgatttacatataaaataagcacaatgataaaagcacttaaaatagtcgtaataatagaataagaatacaaaatcatgcaaactggtaaacaagcaattgtaattaaccctggcttagtaaaccctttaaaaattaaataaaatataatgaaaacagcaacaagagtaagcgctatcaaataatcaaatgcgattaatcctccaataaatgttgatatgccttttccgcccttgcctttaaatacaattggataaatatgtcccagtaaaacagctagtaaagctaacattacaaatgtagaatgtccaaaaaggtattttgcaatagaaactacgattgcccctttaattgcatcacctaaaaatgtagcgatgaaatatccttttccatatacacgccccatatttcttgcgccgggattcccacttccttcatctcggatatcaacgttatatctccatttcgttactatataagcggtcaatatgttcccaaataaataagaagcgaccaaatacaaaaactgcatactattaatcatataatcattcactttctacatggaagtacttatacaatattcatgaactatgtatattgtacttttttatccacttccctttatacattttaacatcatatatttacaaatcatacaaaaattctcatacgctatttttaaaaatatatatccctcattaaataatatgttcctttcactgccatttctgcttgtgatacgaatgtaatttctttcatactttcttcacagcatttcttaaatacagcaaatatttcaggaactaaacgcaatatactgccacttactgcaattggcgttgagtgcttaaagttcaacttgttataaacatttactgtaatccttgccaattcttttccagcttgcaagataatttcacgtgcatcatcattcccatttctcgcttcctgaataactaatggcgcgattgctgcaactttatcttttgaagaactataaactagtctttttatatgagacgacgtcaaaagttgaaactcatcttgaatccttaagcttaatggacaaagtgcaactccttgatcaaattgattggccattctttttaaaccttgtaatgcaatccaatatccgcttccttcatctcctaaaatatgtccccatccaccactatactcgtacacttctcctttctttccaagacaaattgcacctgtgccgccaattgttaaaattccatcttttccttttaaaacagctgcatgtgcaatcatcgcatcattaaaaacttcaattggtgttccatacttcttctttagacgtaatgttaattcattcgtatttactccacttacacccgctaatcctaaacaaatacaaacgcaatgcccatttaatacacctttctggcattgatcaatcacctccataatatgcacaagaacttcttcaaaatctattaatatatttccaaaaccacttgtagctcttacaagttcatttccgtctttatcaaatgcaattgcttctgtctttgttcccccgccgtctactccaatcatatatttcatctattcgcctcattcatttcaaattggagggaatgttatattcccaaaaactacagattcctttgcacctgttgcgctcggcacattactcggattacgatgatatgtttcatttgctaaaatggcaaaggcgattgcttccttcgcttctgaagaatagcctatatcttcttgaaggaataatgcacatttttcttctttcaatccatgccgtatcatttctacaagtgtatcattataacttccgccaccacctagaattacctcatcgatttcataatacggcagaataaactccttataatgataaacaattgaacttgctgtaaaccttgtgacagtcgtcaatatattttctttactatgcttttcaaaccgctttaataactcactgacaaattcttctccaaactgttctctaccagttgatttcggtggattcattttcagaaatggatgattcatacaatatgtcaaaacctcttctacaattacccctgcaacatacataacatgcatgacctcctatttactaaaaaacaatcatgtaagtaaccaacgtacaaccaatcgaaaacaatataaatctaaaaaacaactgagctttcgatgcaaacgatccatcaatgaaagaaacaactaccgtaagcaaaacgcttgccgcaatacttgtaacgagccaaatactatgcatttgtgataaatttagcatgcctaataaagggacaaaaagtaaatttgcacaaatcactccaaatagtaataaaaacacacctttataactaaattttatattcattctatttccccctttctagttttaatgtgaaagaagtgatagacaaaaagtctatcactcaaaataacagcatgcagattaaggattaaccgactctccgtcaccattcttttcgatttcaagcatatttttgtcgtacattttaaagaatggtaaataaataagaaacgatattgctatatttataaaaactaatacaatcgcacgccaatctccacctgttgctaaatatgcaccaattggagcaggtaatgtccatggcggcataatatgcgttggtgttacaaatcccattgcggttgcagcatacgctatagtagctgttactaacggggtaatgacgaaaggaataattaaaattggatttaatacaatcggcaaaccgaatataaccggttcatttatattaaaaatccccggaacaatacacgttctcgataatgctttcgaatattttgatcgaccaaatacaatcatagctaacacaagccctaacgttgcgcccgaaccaccaatccaaataaaccattgataaaacggttctggtgcaataaacggaaaatgactcgctccacttgctacagcttcaccgttctttcctaaatacacatcccaaagtggccttgccacagtacctacaactgatactccgtgtatcccgaaagaccagaaaaacgtaattaaaaatacaggtataataacgccaaagtaactatcaccagcttttactaacggtgcggctagtttatctacaacgtaatgtaaatcaactttaaaaacgactgtaataagactcatcataataataacgaatgctgcaggtataagtgcttcaaatgaacgtgatactgacggtggtacttgttctggcatttttatcgttacgttattcttcttacaaaaccttaaaatctcaactgataaaatagagacgatcatcgtcacaaataatccatgacctccaagatttgtcatcggaagcatgaatccttttttatcaattaactcaggcgttaatgttaaaagtagtgaacataccgcaagctgtgctcctgataaagcatctaatttataacttttcgctaaattatatcctattccaaatgctatatataaggacataataaacatagttaaacgatatggtatcaatatacttgtttgattctttaatgcccaaaccgatatgaaactatctttcggcagtggtggaaatgctactattaaaaaaaagcttcctactataataaatggtaacgccgaaataactccatcacggattgcttgtagatgcctctgctcagaaagccttgccatcgggccagataagtttttatcaagaaacgtgacaaacttattcataacgcttcctcctaactaattaattcatttacagtttttaataaagtcgggcctccaagtggcgtgtatgcttgcggtggaatgatgccacacggaatagattcctcctctgcaaatttttttacagagtcaaatcggtgtcttatttgaggtgccaccattacgacatcccagccattctttacttcttcctctacctcattcgttccaattgcatgcacttccatgttcacaccatttttctccgcttctttttttaaagcgtttacaacaattgcactggacattcctccagaacagacgaacaaaactttcatttattaatcctcctatacttataatttattacccttcaaatgaaaggaagtttcactttactaacaagcatatgaagtagtaaatgaatttagttataatgaaagtaaatttcattaaaaatatttttcctattaaattaatgtttcaatatgcaattttctctattgcaaagtcaacctcgcctcctatattattttaaataatcatatgatagggaggcgtataaatgatcgttaaacgtttattaatgatatgttgtatcgtcatcttgttcatccctttctctttcattccccctcactctacttatgctgaagtaaatactgcatacaaaaaacatgaattacgtgctgtatggattgcatctgttctgaatattgattggccctcaaaaactggcttacccattgaaaaacagaaacaagaatttataagattattagacgatgtaaaaagcactggtatgaatgcagttgttgtacaaattaaaccaaccgctgatgctttctatccttcaaattacggtccttggtctgaatacattacaggaacacaaggaaaagatcctggttatgacccgcttgcatttatgattgaagaaactcataaaagaaatatagaattccacgcttggattaacccataccgaataacgatgaatcacaccgatataaatcgattatcaaataatcaccctgcaaggcaacatcccaattgggttgtcccttatggcggaaagttatattacaatcccggtattccagaagtgaaaaaatttataacagaaggtgctttagaaatcgtgcaaaattacgatattgatgcgctgcatatggatgattatttttatccatataaagtagccggtgaagaatttccagatcagaaaacgtacgaaacatataataacggtagatttacaaatatagaagattggcgacgtaacaatgtaaatgaacttgtaaaagatttaaatactgctataaaacaagaaaaatcatatgtaaagtttggcattagtccgttcggcgtatggagaaatatagctgacgatccgactggctctaacacaaccgcaggccaaagaaactatgatgacctttatgctgacacacgtgagtggatacaaaaaggatatattgactacattacaccgcaaatatattggaatataggtttcaccccagctgcatatgacatattagtagattggtgggttaaagaaacaaataacaaaccgattcacctatacatcggtcaagcggcctataaaattaataataactccgtccctgcttggtctgatccagaagaatatccaagacaaattgcattaaaccggctatatcctgaaataaaaggtagtatgcattttagcttaaaagatattaataacaatccacttggagctaaagatagactctcaaaagacatatataaatatcctgcattaattccgcctatgccttggcttgatcatgatccaccaaaacaaccgactttaaaaggtgccattccaagagatgaaggtattgcaatcggtatcattgacaatagagataatgattctacttattacgctatttaccgcgcgaatgggaaaaatgaagtggatatacaaaatccgaaaaatttacttactactgtaagaaaaacaaaacttggagaaatttatgtagataaaaccgttatttctggagaaacgtatacgtatgtcgtaactgcagttgatcgattgcataatgaaagtgtggcttctagtcatactaccgttaatgcaaaataaaatctcataacaaaaagcgccctaaagctgtgatacttagcttttaaggcgctttttgttatttattcttaaacttctcagtcgctgctctcatcttcacatttaaatcgtgatcaattgagtcgcgaatatctcgctctactacttccatttctttttggaaattttccaagtagattttcagttcttcttctttctctggtctttgtgaaggtggtaattgtactaccaacgataacatggccgttaaatctttcattaagaacgtttcaagtttatgttgttgttcaaacatgcgttgctcttgatagtacggaagtgcattcaatactgaaattgtaatatcatcaaccgttctttgtaatgaaggatttattgagcgtttatacgcttgaattgtatttaatgcgtctggataacggtcataaaaatacaatttgtaaaatgataagtctgtcggttttacagtttgctgtgtctcttgtcttaagaaatctttcactttcatcgcagctacatcaatatcttcattcgtaagctttttcgtagtttttgccattacatgcacttttttctgcttttctttcggtaacatcgagaagacttgttctctcgtacgttgacctgatgcacaaaatagagtatttaatgtattttgttctttctttccttcagtgcgaatccagcgataaaacagtggatgttgtgtaaattcttgtagaaacggtattgatttgtttgataacttgtctaaagaatcttgcgctcttttatatggcttcgtccatgaaaaatacagcttccgtccgaaatatacgactaaaacaacgacagtaaatgctattaaaagcaatgtaccgagtagtaataatactgtttgaatgaaactcatttgttcacctcctctaataatccgttatttccttggacgctgaatgagtttctgcttcatctcatcattaaatgtgtctagttcaataacgaacttcttacttgactcgataatacgttctgacgatttttcagatgcttcaattgcagcgaacacattttggaatgattcacgtaatttatccatgctaatagcagggttttcaagcaattttgtcgtttcttctgtattttgttttaacgcttgagaattacttaataccatcgattcaattgcttcatttgtcgcattcactgcatcgattgttttccgttgatttgttaacgctaactgaatagcagctgaaaccgttacaacgttttgcgtcatcgtaattgcattacgaattgcctctgttaacttttcattatttttcttaataatgtctacagatgcgatagattgtaataaaacacttttcgcttgctgcatattacgtgtacgtacaagtatcttttctaacgcatcgttaattaatggaatatctctttgacgctctgggttttgtttctcagcttcaagcatgccagcaagctttttccctaagtatacttgtttatcaagcgcatgaattttatcgtgcgattgttctttaagcatttcaagacccactgtatcctcttgtaagttatcacggccaattagaagggatctaatgatttcctcgatttgtttatctatagattggtatttatgcacgtatgtttcaagtggatttttcttgaatactttaaacattattttcttcataccacttgctttaagtgaattgggatcaagctctgataccacttttcgtaattctaacaatgtatttggaatttcttcatttttcccattcatcatcgctgttacaggacgttttaatgctgacaacgtttgtcctgctgcttgttgctctttatctcctaaatctcctagctgagacaatacttttgataaatctgtattttgctcgctatttaacttttgtacataaagatcagcttctttattcagttcctctaattctgcatcttttataactgtatcaactactacttctacattattatctttcatgatcgatacaggttcttttttctcgagttcagtcaacaaaatcgctcctttatttatatgtgcgaatttatatgcactatatttcatctattatatcgtatttcatatacattctgattgcttgaaatcgatttttttagaaatgcctgtttatgcagtcattccctgtttcttactataagtatacctgtaaacaacataattttcctcagacttaagacctagagaacgacatgctgaaggcggattcttcgtatgttacgtatataaattatgttcttctatccttctgtactcaatcttttgacatacaccctttttcaatgtgataattatattgcgcccactcctatttcttcttgcgcgctacgaatgctccattttgaaatgccaataacaccgtttcaaacatttcatcttcttctatcatttttttaaactcggctaattcatttgcatgagaggttgcgttatcaacaacaagaaaaccctttggttgtaaaatgcgttttatatgctcaagccaccacatgtattgcgtacgctctgaatctaggaaaataaaatcaaatgaatgatctaattgcgcatctaaaaatgcccctgcttcttgattatgaacatcaatcctttgtaaaaggtttgccttttcaaaattgacaagtgcctctccaactcgttctgaagaaagctctacagttgttacatttccatttgtttcttctaccgcattagctaaccacaatgtagaataaccattagaagttccgatttctaaaatgttttttgcgctacacccttttactaaaattgataaaaattgccccatctcacgagtaatattccgtaatttttcttcccttgtttttttatttcgatcatgctcttctccatattgttcaagttgaaataataataaatctaacgtatccattttttccatcgcctttccaaagcaatatgatgaaaaagctcttgctgcccgtctactttcattatatgcgaaacaaaaacctttttcctgttatatgacaaagatttgaatttttttatagcatattgtttcgttttttggtaaagttaatttctacgtgcaattattccattcatattatttcatattaaaattgcagttattaaattatataaaccccatttaaatgaatcggtatttcaaattcaattaagcgcccttttcggacgcattttctttgtttatatatttccagaagaaaggatgcttacaaatgaacgtgattagcttagatgctgctagaaaacgaaagcagcataaaaaattaatgattactataccgattattacacgtatttatgaagaagacggggaaattaaatttgaggtagctggcgaaaaagatgtacctcttgaaatgttagaaaaataataaaaaacgcatttctgaagaaatgcgcttttttatatttttacatttaaatgcataagtttttcagggttaaccatcatataaatatttgaaattttctcatcctcaaatacaaacgaaagaacataagttactttattatttattgtaactataactcctggtataccattgaccattttgaaatcaacagtgtactcttctgtcaatcgttgtgcaatcccaaagaacaaacgtataattcgatccgcagaataaatcgggttaatcgcagtcgtaactttaccaccaccatcagctttgagtatagcatctgtttttaatacttctaacataccttccgcatccccacactgtaatgatgatacaaacttttcaacataagaagccattttctccgtgcttaattttgattgcttcggtttctccaacatgctttttcgagcacgttgaaagatcttcctgcagtttacactactcttatcaacaattgaagctatttcttcgtattcataactgaaaacttctcttaatatgaaaacaatcctttctacctcagataattgttgtaaaagtaataaatatgcggtggaaagggattctttcattataaatgactttgatggctcatcactctcttctacaattggctctggcaaccacatccctacatacacgttacgtttatgcgctgccgatcgtaatttatcaattgaacgatttgtcgccatcttacataaatatgctttcatattttctatagattgaggatcttctatattatttagcaagataaatacatcctgaacgatatcctcagcatccataacactcccaaggattctgtatgctaacgaaaataataatggttgatacgcttcatataactgctccgtttccatgatgaactgcctcactttcatattgctttaaaatgtataacgctgcacgcttcccgcttgctaccgcagcatcagctaatacttcatcatgccctacccaatctcctgcaacataaacacctggcatttcaggtatattagggcccgctttttcaacacggtcaatatgaggaaaatcatgtactactgttattttcggtaaatattgctgtgcaacaacttctcttttccaatttggatgtaacaactccatcgtactttccaactgttctttatcatcacgaatatgattcatctcgagtacaggattatagtacttaattagactcactacaattgatccatcttcacttaatttagctgctctcgattgatttgtgaaaaatataggttgatctaatcctaatacaaattgatgtgtaggattgggtaattgtctcaagccaatatctaatgcagcaacagtaaccggtacagattgttcactccatctatgcaaacttgttccttctgcaccttttattattttacaagcttctttcggcggagtcgtcacgatgactgtgcctacttcaaaaacctcatcatcaacacaatgtattctttgtttaccttcggaatgctcaatttccacaacatgctttttagccaaaaactgcaccccgatatcattcgctatagctcttaattttgttattatcgtctcccaaccaccatctacataaagcactccctcttttatagaaagctgtatttgctttagtacagatgatgctaattgtattgtaggagcaaacgtatatgttgttgttcggcatagcgcataaaatatattgcgaaccattggatcttttatttcattttctgcccatgtagttagactcattttcggaacttctcctacatctaaatttcctaaacgaatcataagacgtgagaattgtacttttgcagaccaagaaagtagtggtgttgataaaattgagtaaaaatctgttgggatagtgaatatatcccctttccatattccatgtgcttttgtagatggtattccacctggaagagtcataccaagctcattaaaagttataaacgctgccccgcctctatataaagcatgtgcaccaagattcatgcagatttcatttttatttgtagtcatccctcggccaccgaattgactggacttttctaatacaatcactttccttccagctttcgctaaatatatagatgctgttaatccagcaagcccaccgccaacaattgctatatcaaatgtattcataataaaatccctccttaatcgttctacatacaagacgaacgattaaggagggatgtgacataaaaataaatttttattatcctactttatttcattactttttaattcgatcatattgcatacgaaataactcaattgcaaatggaatatcctcttcactctttaaataataactaatccatcctgattcaggtaatacgtgatgtggttttaccaagccttgcttcactaattcatctcgctttaactttggaaatggtaaatcagctaatttatcaccatgaagatggccaagttctttcttgccataatttatttcaataccaccaaatcgatgcggtttttcagaaacacccgcccagctgagtacttcatttctaatcatttcactaaatgacatgaacattcactccttataaatgattgatgtaattttaaattaacattttcattacttttttccatcaatccaaagtatgaatgggaatacgaatatagtttggtcttaacaccttattctttatggaataagtgaatttattaagctaccgacaacagcacaaaacaaagactagacacatatcctaattttgtaacctaacttacctatagaaaggcgggtaatacaattgactgccaacatcgactatacctccccctcaaccaattttacttatgatgtaaataaaagtaatttttttcggaaagatgcccaaaattatataaatgtacttggtattaaacaattaaatactttagaaaatacttctttattagatatttatttaagtacaggaaatgttgtagaaccacatattcatcaaaatgcagctgaacttgtttattgtatttcagggtctgctgttgtttctttacttaatccatttacgaatcaaatattaaacttaccgataaaacccgggcaagttgccaacattccacaagcgtggtggcattatgaaattgctacagcaaataatactcatttattagctattttcaatgctccagcgccagaagttattttcggttctgacattttaagattaactcctgctcatatgatggcacatacttactgcctcaatgaacaacaatggaaacaagcggtttcccctattcaatcaactactgtaattggtcctccgtcaaactgcaatcaaaaccgtgaaatgaaaaattatccaacccagcccctcgctcaacaacataatccgcatcaccaagattcttattacttccctctttactggggctattaatttgtaaattttcaaaagaatcatcatttatctcctaggaaaataccaaggagatttttttattgtatcttctcttcctattaaaaatagtaacaattgatagtggacatacatataatatttatatattaaattggaggtgatagtactatgagtaattataactatcgaaaaaactactcttataataaaaatagtagttcttcagcatcctctcaatcttccaattcccaatcgcaaagagacttagcggagcaaggctatgtaaagaaaaaaggatgtaactgtaataaaaataaatagtttatcttatggatgaattcttttttaaaagaattcatctttttttactgatcggaaatttttaaagttacataacttattacttaaatgagaaagggtaaattatacttttttatacgaacttaacaaagagtaattgttcaattaatttattacttattttcctaaaaaatatagtccttcctaaatttattaggaaggactatatacaaacccctgtttaatttcctactaaacattgtaacaaattaaacgatattaatacctgcacttacaaatccagcaactgcagctattggacttgctgctgttaatgaaacatataacagtattttatccccagctgctactggaatagcttcaggtatgattcctgatgctgtagaaccaatcgctattgcggcaaatgctggcgttaataatagaggtgcaccttgtactgtaaacgtattgcttgctgcaggtgcagttaatatttgtatttgcacttgaacaggtgataatggagataatgcagctgttgcactaaagaaacctgctaatgacgtaatagttcctgcgcgtggtgctacaaatgcataatcacctacacctaatgctaatgtgatacttgttccacccgttaacgctataccaggctgactaaatccaaatccgagaagagttcctgtattagctactaacgcattaactaatgctgctggtgttgtacctgaagcaaacggaataatagctccgccaccagttgcacctgttgctcctgttaagcctgttgcaccagttaaacctgttgcccccgttggacctgttgctcctgttggacctgttgctcctgttgggcctgttgctcctgttaaacctgttgctcctgttaaacctgttgctcctgttgggcctgttgctcctgctcctgttgctcctgttgctcctgttggacctgttgctcctgttgctcctgttgctcctgttgctcctgctcctgttggacctgttgctcctgttgctcctgtcgctcctgttgctcctgttgctcctgttaaacctgttgctccgcctcctggacctgttggacctgttgggcctgttgggcctcctcctggagtagcaccaattaattgagttaataaatttaataaaagttgtaaacttgcagggtcaataattaaagagaaaaagaatggtgcaagagcactgtagaattgttgtaataaagaaagtaattgacttagatttgggttaggagattgtagtaaattaataatactttgaattaattgttttaagaaattcccttctggagaaggtgctaattcatttagtaagttcaatagttgagtaaacaaattgagtaaagctaatctgtttgcatcacttggatttgcaaaaaacgctgcaatagccgaaattaaagagtttagtaaagtaattaatctacctaattgctcactagtaatcggaactgtttgtggattgttacaacactctggagtgaaaacaatcggattattgcagtggttatgaccgaaacaattattacttgtcatttatgtcctccttacttgttttatatttgagtttttcctattataaggatcataaagttgtaaaagagtatgtgttatatattgacttaaaataggaaacatgaaatataattaaacttgcaaacgctatttaattatgttcatgactcacatattaattatatgtttttaataattgactgcttagattaaatacctaaacttaagagtttattttatttttccacgtttatctcttaggttcaaagacacattttaatttgaatacaaaaaccgaatttacgattaacatatattccgcaagtaacaacatcattttttcatataaataaagaacatttccttactaaaattgggctcaccttataaaggtgaagccgtttctattataaaaaactctcatacaatatagtggacaagttattttatacttcgttctaataaaatattgtaaggagtgaaaattaattgcctatcattcaaccatttatggcatctagaagatttacatccacactaggagccggcacaggtacaggtgcagcttttgcaattgctgccacagcttgtttaaacgatgcgggtactactgcaaccgcttttccgactttcacgtattacaacttatatgtgaacggtattcttcaaccaagcgtgaactccagtgttactactggtcctactggtgctattacaattcctggtggggatgcattagacggcggaattccaattacaattgaatttatcgtcacttaatgttaacgaatgtaattcagaacaaaaaagacagattccttttcattaagaatctgtcttttttaattaataataataaattgtaaaataattgaagcaccttgcgatggtggttggttatccaataaagttagtttaccagtactaacttcatagaatggttgtggttgcaaaattccattgataaacaaatttatatacgaaacctcagtaggtgatagtatattcgttgtaccatattgagctatgccatctgcatctgtatatataagtttctctccatctgaaaaagtgtaaaataacaaattagttgttgttatagggccaatccccccagtaggacctgttgctcctgttacacccgttgctcctgttgctcccgttactcccgttggtcctgttgctcccgttgctcccgtttctcccgttactcccgttggtcctgttgctcccgttgctcctgttgctcccgtttctcccgttgctcccgtttctcccgtttctcccgttattcctgttattcctgttgctcctgttggacctgttgctcctgttgctcctgttgctcccgtttctcctgttgctcctgttgctcctgttgctcccgtttctcctgttgctcctgttgctcctgttgctcccgtttctcctgttgctcctgttgctcctgttgctcccgtttctcctgttgctcctgttgctcctgttgctcccgtttctcctgttgctcctgttgctcctgttgctcccgtttctcctgttgctcctgttggacctgttgctcctgttgatcctgttgggcctgttgatcctgttgatcctgttgggcctgttgatcctgttgggcctgttgctcctgttgctcctgttgctcctgttgctcctgttgctcctgttgctcctgttggaatatatattggtggaagagctgaaaatgtaggtccaatattctcaggttctatcttacctttatttattgataatttatcattccgcttcaatttaattcctcattccacatatttttaattaacttacataagtatgagtctattattaagaaatgctttcataactattcttttttccttccaaatgattcatacatatattaaacattttaccgttgctataactcctattaatataataaaatgatagttccattccaaaaacacgaaacttattgcattctaatttaaaaatgaggtaatttatactcaagataaaaatgaaaaaagaatagaaaaactagtatcaacgactcttgaaattattcttccatacagacttactgaacctaccagaaatactgggtcaatagttacaacaaactctatgttcgctaataatacattaggtgatcccatcactgtgatattaggcggaactaatattcctctttctaataaccaaagcctcggtaattttacaattaacgcctcaaacgatatatttacaattcctgtaaccagaagatagcatttaacctatcaagttaatacgacaactgctctactcgctggaacaaaactactattaaacgcttctactccacttcctggttctattttttctcccgctatatcaacttcaaattataacaataatttaattgccgatactacaatttcacttcaattattcgacgtattatacatcgttaatttggttggaggtggttcaacaggtgcctctctaacaattatacgaatcgatttaaaaatgattcattctttttctaataaacattattaaatactaagtctgtcatgataagaacctcccaattatttcataaaagtggtggcgcattaaagaacaaattgcactatattcatagtagaaactatctatactaaattttccgtatatatattatcaatttacactgacttccaccgatgttacattaaatatgaagacagtttcttttttacgaaccatctcaatacgtatttgagaaacgtactccaatcctatacgcgagagcaatactatgttgacactcagatgagtgtctttttttgtgagtaataaaaaataaaaaccatctcttaaagatggttttatcttttgttactataaatgtaaacttatgcagttggataataaattgtcatgcttaatcgagtcaaagattcccctaaattataataagagtgtgatctatcggccttaaaacgaattgaatctccactatttaatttatattgacagttattcaattttactgtcaattcaccttcaaataccgttataaattcttctgcgccttctttatgcccttctgaacttaatttcccttctgtttctatttccactgtatacatttcaaaatgtctatcatcttgaaatggaaaagaaggatacactttatattttccattgtcttcagacaatacttgaatatcttttcttaaaatcactttcgtatcaggctgaggattattgattaaagaagtaaaagaaactttcaagccatttgcaattttccatattgttgttagtgtcggacttgattcccctctttcaatttgtccaatcattgttttacttacacctgttaattgagagaccttttctaaacttaatttttctttttcacgtattgattttaaattttttgccagaataagttgaatttcttccataaaaaacactcctacaccgcatacaatataacgaccgttatgtataataaaaagcacacgttatattgttctttttgatcattataacatacaaaaattgggaggttttgaaatgcctatattttcttttttgttatttgtatttataagtagcttcacacctggtcccaacaatttcttagctatgacatacgcaaatcaacatggattaaagagaagcataaacttttgctttggagtagcattcggttttttcatcctcacttctttatgcagtttctttaatattgttttaattaatattatccctataattgaatttcctttaaaaattttaggtgtcgcgtatatgctatatttagcctttaaaataattactagtaaaggcggtgcagatcacaatgaaaaaaataataaaaacttatttacagtgggtattttcattcaatttgttaatccaaaaggaatattattcgggctcacagtagtctctacttttatactcccctactacaattcatattcaagttttctgcttttctcattatttctaggtatagtcggtttactaagtacatttagttggagtttatttggttcaatattccaaaaaatattagtaaaacataaccaattattcaacatcattatggctgttttattagttttcagtgccgtttcaatcgttatacactaattcgatgctcattttagattttgtactttttaataccactctttatcaatcagactactttatatactaatccatccacataccctatgtggtttaaaacttttaagaggaaaccttctaacaataggtttccttccatatcatattaaataagaagcaggttaaatacggaggtgattttgattaagactactttaatttctcatttttacaatgaagaatatttacttccatggtggttaatgcaccatacaaagctatttgatcatggcattcttattaatcgtggatccactgatcgttcagttgaaatctgtaaaacattcgctcctaattgggaaatacgaaactcaaaatcactcgaatttgatgcttatttagttgatcaagaagttatggaaattgaaagagaaattacaggatggaaaatggtattgaatacgacagaattcctgtgctgttataataaagaacaatttttcaaattacttagcactatgggtggcaatatgttttcaataagaatgattatgatgattgatgaaccaagttatggctacactaatccaagatatagctctccgcttgttaaacaacgttatcacggcataataactcaacctaatccaaaccaactatatcttaacggtagattaattcacaataattcgcacgggaactatagagtcgggagacatggttcgcattatccttatagcatttacatggaacctgcttttatttttaaatttttttatagtccatggaacgatgcaatgaaaaaacgaaaattacaaattgggccgactctttctcaacatagtgtacagcgtggactaggttcacatcacttaacaacaattgaaaaattagaaacaaaatacaaattctatgcaactttaactacggacctccggttattcccagaataccaaattatatttcctgacctttatccttaatgtcatgaatatttagtttccacatccatccgttttttattaacatatcaactccaactaaatatttttctctagtagaaatctgagctaggactcttgctgcgcgcagattcctcttatttaatgtcgtatcaccagcctataatctttcataccatttcattgagtacctgatgttggattagaaataaaaaatggcaattcatttggaaaattttcaatttcagattatataccttctaaaacaaagtattaaaacaatagaacctaaactaatgtcttaagttatggctttatttttttcttattattcactttaaaatctttttataataatattgaaaaatacagtataatataaattactgttctttgggagggttataatgtctgataagtataaaattttcattcttattgttaccgcatctttttctttcttttccttaataaaagatttccgcaacacttcaaaaagtttcttttggggtagttttgtaattcttacaagcttcataatacttttaacactcgctttagatttaactcaaatactcctatattcagcgcaaattgcgcttgaaattattacaataccacataaactctttctaccatctgtcactgaagccgctattatttactaaaaaagtattttaattttcttatgcatgccaaaatatattttggtaaatttgacacacatttatatcaaacaagcatattttattgtatggtgactatctaataatacaaatttttaattttcataagatctttttatttttaattaaaaatttacaacattctaaaacagtatgcacataatatcctccattccctttttcaacatgacacttgtctcagagcgcctttaaaagcgctctttatctttaataaaggttttattaaaatttaggttaaaaattaataccctatagtcataatagctatttactgtttccaaaataagttgcattaataatatagaaatgaaatacctataaaaattattactttactatttctttaaacatgctagtgaggtgatttcgatagattatcaaaacaaagatatgttcattaacttttcacttttagatattaaccgtattattctcccacattctcctactggggctaccggctctactggagctactggagctaccggacctactggagctaccggttccactggacctactggacctaccggttccaccggacctactggctctactggttccactgggactaccggggctaccggttccactggacctactgggactaccggggctactggctctaccggacctactggacctaccggttccactgggactactgggactaccggggctactggagctaccggggctactggctctactggttccactggacctactggagctaccggttccactggacttactggctccactgggactaccgggactactgggacttagtttgtctagcatctaaaataaaaattgacgtttcacgttgtttgtttcgttcagttttcaaagaactacttcgtcgctcagaggcgactttattaatataacatttcgttatattttcgtcaacaacttttttcaataagttgtttttcgtttgttttgtttgttacctttcgtggcaacgaatataaatataccagtttgattattaaaatgcaatagtttttctaataaaatttttaacttagtaaaaaagtataaaaacagcacatttcttctatataaatataatttctcgcactatcaagatttactatacccacgcaactcatgctcaaataaaaaaagctttggagaaatctccaaagcttagtcttgtttatggcgcatagcagggaataataatacatcacgaatagatggtgcatttgttaataacataactagacgatcaataccgattcctaatccacccgtaggaggcataccgtactcaagagcttcaatataatcgtcatccatcatgtgagcttcgtcattaccttgttcgcgctcttttaattgcgcttcaaaacgttctttttgatcgattggatcatttaactcagtgaatgcatttgcatgttcacgcgcaacgataaataattcgaaacgatctgtaaatcttggatcttcatcattctttttcgcaagcggcgagatttctaccggatgaccgtaaataaatgttggttggattaatttatcttctactttttgttcgaagaattcatttataatatgaccaacttccattgtatctttaatttctacattatgttcttttgcaagttcacgcgcttcttctacactcatcggattccagaaatcagctccagagtattgcttaatcgcatctaccatatgaagacgtgtccattctggttctagattaatttcataatcaccatactggattgttgttgtacccagtacttttttcgcgatatgagcaaccatatcttctgttaacttcataatatctttataatcagcgtatgcttcatataattcaatcatcgtaaactcagggttatgacgagttgatacaccctcattacggaatacacggccgatctcatatactttttctaaaccacccacaataagacgctttaaatgtagctcaattgcgatacgcatatataattccatatctaacgcattatggtgtgtagtgaaaggacgcgcagaagctccacctgcaattgcatgcatcataggtgtttccacttcaagataaccgttgtcatctaggtatcttctcatctcacgaatgattttactacgagtaacgaacgtttcacgactttccatacttgtaattaagtctaagtaacgttgacggtagcgttgttcaacatcttttaatccatggtatttatctggtaatggacgaagagatttcgttaatagcgtaaagcctgttgcttttactgaaagttctccaacgtttgttttgaacactttaccttcaatacctactaaatcacctaaatctgctgttttaaataattcgtactcgtcatctccaacagcatctttacgaacataaatttgaacttgtccatgtaaatcttgaacatgtgcaaatccagctttcccttttccgcgttttgtcataatacgaccagcgatagaaacagcgatttccttctcctctaattcctctttagagaactctccatatagactcactaagtcagttgttgaatttgtgcgttcaaatcttttaccgaacggatcaattccttgttcacgtaaattatgtagcttttcacgacgaacaatcaattggtcgtttaattcttcgtggttcatgttatccatgatattgatatcactccagctctatttaattttacaatatatacagtatagcattttctactcaactagaaaaactgccagcaactaactggcagctcttctttctttcacgtaattataggaagtgtatagaagaatgtcaatctcctatgtccattattaaccaacgtaaattgtttgttgtttcgcttccacttcttctacaaatgtacctaacacattcgcaaggtcttcccgtgtgttacaagcattaataccattacgtacactcgcattaccacgaacaccttttaaataccaagctgcatgttttctcatctctcttacagcgacactttcattctttaagtcgataagacgatctagatgcaacatacatacatcaattttctcgcgcactgttggttccggcattaattcacctgtctccaaatactttaccgtacgataaatcatccacggatctccaagagcagcacgaccaatcataacaccatctacaccaatttcatcaagcatacgctttgcatcttgcggcgttgcgacatcaccatttccgataaccgggatatttacagattgttttacttgtttaataatatcccaatccgcttttccttcatacatttgcactcgtgtacgtccgtgaaccgccacagcttggccaccagcacgctcaacagccctagcattttctattgcgaaaatatgttcttcatcccaaccgatacgcattttaactgtaaccggcttttcaacagcatctacaaccgctgctaccatttcatatattttattcgggtctaaaagccaccttgctccagcatcacatttaacgattttcggcactggacaacccatattaatatcaattatgtctgctgtcgtatatttatctacatatttcgcagcatctacaagagtttctttttctccaccaaaaatttgtaaacttaatggcttttctctctcgtcgatatataacatatctaatgttcttttattattaagtaatattgccttatcacttaccatttcagcacaaactaatccggcaccaaattcttttactgttaaacggaatgcagagttacacactcccgccatcggtgctagtacaaccggatttttcatctcgatatttgcaatctttaacaatcaatctactccttcctgtacaatcactttggcattaattcctctatcgaaacatttaatgccttagcaacttctactacaaaatcttgagaaggcgatctattccctctctcaacctcacctaaaacagatacagatacccctagtgctttagcaaaaccttcttgtgtgtaaccttttagctttcgaaaagcacgaatgcgccttccccatttttctgcttccataccgttactccctctcgccttttcatttcttctacttgtgaacatgaaatgttttgttttatgtcttgattaatttctaacaacggaacgataacaaaagctctttcaaacatccgcggatgcggaacaataagattctctgcttcaatattctcttgattataaagtaaaatgtcaaggtcgatagtcctcggcccccacctaatttccctttttcttcctaggtcattttctactttttgtgttactttcaataattcttgtggtgataaattggtagaaatttttataactaaatttaaaaagcaactttggtcagtatagccaactggctcagtttcatatacagatgaaatatcatcaacctgaatataaggatttttatttaaaaactgaatcgcttcggttagatacgtataacgctctccaatatttgatcctaatgcaatgtaagctatattgttcatggacgttctctcgtaatttctactgctacagcacgataatgacccggtatcggtggatccggcttaattaccttaattgtacagcgcgaaatactttcatattgttttaatatatctgcagcaatattttcagcgatactctccacaagcttatactttctatcctcaacaacttttctacataattcgaaaagctctccataattgaccgaatgctctaagtcatcactttcccctgcacgctttaaatccaactccaccgttaagtcaactttaaatctctgacctaatttattctcctctgggaacacgccatgataaccataaaactccatatcatggatataaattttatccaattaccttacccccttaccaatcatcgcatccatcattttagccatacgcgccatttctttcacatcatggacacgaacaaactcacagcccttttcaataccaagacaaacagtagctcccgttccctcaaggcgttcctctactggcaaatctaatacgtgcccaataaaggactttctcgaagtacctaagagaaccggataacctagcacatttaactgttctaaattacgcatcgcctctaagttctgctcaggtgttttagcaaaaccgatacctggatctaaaataatattctcatctcgcacaccagcatttttagcaattttaatactgtcatacaaatcagcaatcatatccgccattaaattacgataattcatgtcatcgcggttatgcattaaaatgatgggtacatcgtaatgagctgcgacttcagcaattttcggctccgccttcgctccccaaatatcattaataatatgagcaccagcctcaattgcttgctttgcaacttcagctttatatgtatcgatagatataggcaattttacttcttttgaaactgcttgaatcatcgggacaactcgctttatttcttcttctactgatactttagcaaaacccgggcgagtagattcgccaccaatatcaataatatgagcaccttcaccttgcatttcttttgcgtgacgtaccgcagcatctacctcgttgtaactcccaccatcagaaaacgaatctggtgttacatttaaaatccccataattaatgtcttttcatttaaattcaatgtatattcgccgcagcgtaaatcataatcccacttcaaactacacatctcctcttcgtaattcatttttgctccataatttctctctttgcattccataaaggtacattaaactttttgtaaccactcctactttacccgggaaatcctgcgcttctatacgataaagcggaacaatttcttgaatggagtttgttacgaagacttcatccgctgaaagcagctcatcttttgtaaagaaaccttcctttacttctatatttaattcttcagcactctttataataaacgcacgagtgataccatttaaaatccctgtctctaacgaaggtgtatataaaacatcacctttcacaaaaaatagattggaaacaataccctctgcaacataacctgcttcagtaagaaaaataccttccttactcacaacatttccaatttcacgcttccctaaaatattatttaaataatgatgagacttcagacgaaatgttccttccggtgtatttcgcacttgttttagaataacaccttctttttccactacatctcctggagctgttaaaggttttataaaaacaataaccgaaggctcttcatacatttccgtttgtaatcctatttcatctatacccgctgatacattaaaacgtacatatgcatgcttcaattcattcttagcgagtaaatctttcaaaataagcatcacgtcattttttgtcattgtccatttaatttgcaatgtatccagcgcttctattaaacggtcataatgatcatccaataagaaagggtgaccattataaatacgaaacgtttcaaaaactccaagaccatataaataaccatgatcataaggagaaattttcgcttcacttgcttctacatactgaccatttacgtaaattaacataacgttgcacttggactgtatttacaaatgaaattctgtaacaactctttcccatgagaagtcataatagattccggatggaattgcacaccctctatcggcaatgtcttatgacgaagtgccataatttctccttcctctgtccaagatgttacctctaagcaatcgggtaacgtctctttcttaacaataagggaatgatagcgcgtcgcagtaaacggattaggaatatccgaaaaaatcgtctttccatcatgatgcataagcgacgttttcccatgcattaatcgttctgcacggacaacctctccaccaaacacttgtgcaatggattgatgccctagacaaactccaaaaatcggaatctttccagcaaagtatttaataacttccatactaatccccgcttcattaggactacatggacctggagaaatcattagaaaatctggtttcatattctcaatatctgaaatggtcacttcatcgttacgtttaacaacgagctcttgtccaagttctccaagaaactgcactaaattaaatgtaaaagaatcataattatcaatcattaatatcatttctctcacctaaccgtttcttcgctacgttcttttgcacgccataaagcaatcgccttttttaacgactctttatattcattttctggatttgaatcaattacaattcccgcccctgcttgtacatgagcttttccatctttagcaagaagtgttctaattacaatattcaattctgtatctccagaataaccaatccaaccgattgaacctgtataaatccctcttcgaacaggttctaattcctcaataatttccatcgtacgtattttcggggcaccagtaattgttcccccagggaatacagccttcactaaatcaaaagcatctttatcttcttccacctcaccacgcacattagaaacaatatgcataacatgtgagtatttctcaattaccataaattcatctacttctacagtgccatatttacaaacacgtcctaaatcatttctttctaaatccacaagcattacatgctctgctctttctttttcgttctcaattaattctcttgctaattcttcatcctcttgctcatccgcgcctctagatctcgttccagcaattggtcttgtacttacttcagttccttgtttcttaattaacaactctggcgatccactaacaatttgaaaatccccaagctccaggtaacccatatatggagatggattaatttcacgaagacttgtataaatttctagtgggtgtgtctgtaacgttctttcttgtctcgtcgacaagtttacttggaacacatcacccgccccaatatattcttgaatacattcaactgccttcataaagccggcttcagtaaaagcaactgcttcacttttcttttcaggactttcaaagggcacagtcacttcaggcgcttctgtcatccaaagactcttccactcatttagccgttcttttgcctcttcatatttatctacataatgcgtaataacccataacacttgttctttttgatcatagacaaatacgtcatcaaataataaaaagaagatgtcaggtatattaatatcatcttccgcaagagaaggcagcttttcaatataacggatacagtcataactgaaatagccaattgcaccaccttgaaaaggcggatactctgggttatagtccgtcttccattgttccatatattcttgcattaaatctaacggattccctcgttttattgtttccttaccactttcacttatatgtaacgtttcatccttccctcggattaccgctactgggttcagccctacaatgttataacgaccgccacggccactttctaacaaaatatgttgcgatttaccctgagaaagaaatttatattgcttaaagaaatctaactgatatggaatagaaagcgctaaagattttcttcgttgcatatcaacaccccgtcttcttttatcccaccctcttagattaaccagctcaaactacataagttatttatatagagattgattatactcgaaggctagtgaaaataatttaattatactacctcttattttacatgaagttttctagtcattcactcttttcctatttccaatcccaaaagaaaaagcaccctttttcaaggatgctttttcaatcgcgtttaattatgattcaaattgataaagtggtgtacttaaataacgttcaccgttactcgggataataacaagtacctttttccctttacctaactttttcgcaacttctgttgctgcataaataactgcgcctgaagagataccaactaaaataccttcctctttagccactcttctcgcatattcaaatgcttgctctgttttcacttgaataatttcatcatatacttctacatccaacgtctccggaacaaatcccgccccaattccttggattttatgtggacctggtttcccaccagataatactggtgaatctgcaggttctactgcataaattttaatatctttatacgcttccttcagtacttcaccagcaccagtaatcgttccacctgtaccaatacctgcaataaacgcatctaattggtcacccatttgttcaataatttctggacctgttgttaaacggtgaatttctggattcgattggtttttgaactgttgtggtataaagtagccatgctcttttgctaattcagtcgctttacgaattgctccacccattccttcaggccctggagtcaatactaattccgcaccgtaagcacgtaataaattacgacgctcaatactcattgtttctggcattactaagattgcattatatcctttagcagccgctaccatcgctaaaccaattcctgtgttaccacttgtcggctcaatgattgtatcgccctcttttaataatccatttttttcagcatcttcaatcatagctaatgcgatacgatctttaacgctactccccggattcataaattctaattttaagtatatatctgcgctgtctgattctacgatgcggttcaacttaacgatcggcgttttcccgattaattctgaaactgattgtgccactcgcattcctgtcactcctaacaccgagtatttttattggttttatctatatttagattttgtcagaaaattccctgtttgtcaattcatttggaggattgctcctcttaattcccttattacaaattctcgattaaatttgtaatatcttctttagagaacttgtatcgttcattacagaaatgacagtgaacttccgtctcttcctcttcttcacgaacttgctctaactctgttttacctaaactaattaacacactctcaatacgctcgcgtgagcatgtgcaattaaattgaacatccattgtttctaatacttttactttatcttctccaagaactgcatatagtagctcttccggagaaagtccttgttcaatcaacgttgatacaggtggaatcttttgtaaacggtcttcaataaatgaaatcgtttcatcttgcgcacccggcataatttgaaggatgaatccacctgccgctaatatgctatcatctccatttacaagaacaccaacacctacagaagaaggcgtttgttcagaaactgcaaaataatacgtaaagtcttctcctaattctcctgaaacgattggagattgaccaataaacggctcacgcattccaatatctttaattacagttacaaacccctctgtacctaccgcttgatatacacgtaacttcccttgttctgttccttcaaaatcaacatgcggattcgttacataaccacgtacatctccatttgcatgagcatctactaagataggaccaatcggaccgttaccttctaccttaatcgttaacttttgctcaccttttaacattgcgcccatcattgtacccgcagttaaagaacgccctagtgccgctgaagctgttctccatgtatcatgacgtctttgcgcctcacttactgtatttgttgtacgtacactatacgcacgcacttctccatcaaacgctaacgcttttactaaataatctttcatacgtatttattcacctttctcatgctgtaaatttgcattacgttcatataacatgtataaaccttttaacgttaaaaatggatctacaatatcaattacattcgattcttcggaaattaattttgctaatccacctgttgcaataactttaggttcttgtctagcttcttctttcatacgcttaacaataccttccacttgtccaacataaccataaagaatacccgattgcatcgcacttactgtatttttcccaactacactgcttggttttgtaatttcgatacgaggaagttttgctgctctgctatataaagcctctgctgaaatcataattcctggcgtaataactccacccatataatgcttttcttcgttaatataacaatatgtagtagccgtaccaaaatcaacaataataagcggacttccatataagtggattcctgctactgcatttacaattcggtctgcgcctacttcacgcggattttcatatttaatatttagccctgtttttatcccaggccctactacaagcggtttaattttaaaatatttttcacacatgcgctctaaagcaaacataattggtggtacgactgaagacacaataatacctttcacatcttcaaacgaaagaccttcatgctcaagcaattgctttacaagcattccatattcatcttctgtcttatgacgatctgtttccatgcgccaatgctgacgaagttccccctcttcaaacacacctagtacagcatttgtgttccctacatccaatacaaaaatcatattctcaccacttatcttatttaatctatatttgtgcagtatgtataaaacttataaaaacatcatatcacacatacttatataatcagctttcctatcctcatcattttacaaaaagattgctctctatttcaatttttaatactagttttacttaaattactttatccactaagttctcaatagtaattaacaaaggttttaacaaacaaaaaaggagtgacgatagtcactccttcgtttcttacttatcttctttatcttcatcgtctttcttcatgttgatgtttactttcacatcatctgaagatgttggacgttctggcaatctgccgtaatcacataaatgattgatttgctcagcatctaacgtttctacttcaagtaacgtttttgcaataagatctagcttatcacgattttcagtaagaatgtcttttgcacgagcataacattctttcataatcgtttgcatttctacatcgatatcgtgcgcaattgcatcactgtagttttgctctgaatggaagtctcttcctaagaacacttgaccaccttgcgaactaccaaattgcattggtccaagcttatcactcataccgaattctgtaaccatacgtcttgcaatgcccgtcgcacgttggaagtcgttgtgagcacctgtactcacttcaccaaatacaatctcctcagctactcgaccaccaagtaaaccagtgattttatcaagtaactctggctttgtcatgaagtaacgatcttctttcggaagcattactgcatatccaccagcttgaccacgagggacaattgttactttatgaacgacatcagcttcatcaagaacaacaccaattacagtatgacccgcttcatggaaagcaacgatattacgttctttttcagagataacacgacttttcttagccggacctgcaataacgcgatccgttgcttcatcaatatcactcatatcaattatcttcttatcttgacgcgcagctactaaagcagcttcgtttaataagttttcaagatcagcaccagagaatcctggcgtacgagttgcaattgctcttaagttgatattctcatcaagcggtttattacgagcatgcaccttcagtacagcttcacggccatttacatctggacgatctactgtaatttgacggtcaaaacgacctggacgtaataatgctggatcaagaatatcaggacggtttgtcgcagcgatgataataataccttcgtttgcaccgaatccatccatttcaacaagtaattggttcaacgtttgctcacgctcatcatggccaccaccaagacctgcgccacgttgacgccctactgcatcaatttcatcaatgaaaatgatacaaggagcatttttctttgcattttcaaataaatcacgtacacgtgatgcaccgacaccgacaaacatctctacgaagtcagaaccactgatagagaagaatggaacgccagcctcacctgcaacagcacgtgctaataaagttttacctgtacctggaggtccaactaataggacaccctttggaatacgagcaccaacttcagagaacttacgagggtctttcaagaattcaactacctcaacaagttcttgtttctcttcatccgcaccagcaacatctctgaaacgaacttttttcttttcatcattatataacttcgccttacttttcccgaagttcataacacggctaccgccgccttgagcttggtttaataagaagaagaataaaatgaagatgatgacaaatggaatgattgaagtaaagaatgttacccaggcacttgtttcttctgctggttgatacttaacttcggcacctttcgctttatcattaattttcttttgtaattcctcagtatttggtgcataagtaacaaattgttctccttggctagagttattaaattgtccttttacctcaaatacaccatttttcggttgaagttgcacattacgcacttcaccgctttctagtttagtaatgaatttgtcgtagctaactgatgtcgttttttgtgtcgaaccattaaaatagctcacgattccaattactactaagaatatcagtaaataaaagatggtattacggaagatacgattcattcctaacctcctctcacggcataaacactatagtaaatcgtaacatagaaaaactttcctatacaattgtgaagcctatatttaattaatttgagtaaacgcttggttttaatacgcctacataaggaagattacggtactgctctttataatctaatccatatcctactacaaattcatgtggaacagtaaatccaacataatccgctttcagatcaaccttacggcctgttggcttatctaataatgtaacaatttttacagacttcgctttacgatatttgaataagtctactaagtagcttagtgtaagaccactatcaataatatcttcgacgattaaaatatcgcgaccttctacagaagtatcaagatcttttaaaattttcacttcgcctgttgaaactgtagagtgaccgtaactagatacagccataaaatccatttcaagatatgtatctgttctctttaataaatctgccatgaatggcattgcgccttttaatacaccaattgcaagaggtactgtgtttttataatcctctgcaacaattgcacctagttcgcgcaccttttcttgtatttgctcttcagaaattaatactttttcgatatcttgattcatcatttcattatcctcccggaagactccttgcttttgtagtgaataatcatatatttatccttctttgccatctctttcgaaattgcaaatgcagatcgcttcaacaagggtacccaaataatggtcccacttgcatcacaaacgaccggccattcttctcttttttctttcggtacttttgcttcgataaaaatagcttttatctttttcgtgccattcataccttgtattgacatgcgatctccattttccctagaacgaatacgaagtggatatgatatatcattatacttagcaacaaatactgtttcattcatgttacttggtatatcttcgctcacctctgttacaaattcatccccgttcaatagcgtaatggtcccgggtactgataaatcttgtaaaaaaggagaaacaatttcttgtttaaatctaaagctacactcctcgtatgtacgaacaattttcaaatcacctggaaaatcaagtgaacctgaaggttgtgtccgcttaaaaaactcaatcaccttgtcaatatgtatggaagaaagagaagatggaatcttatattcataaagatagtttaatattagttgaatccctcttctttgtaaaggcatagacatggattcaaaggcaggaattgataagctaatttgtttatcacttttttttgtaattactttattcattttctcaaaagctaattcctgcaaataagcctcatcctcttgcatctgcacgctaaatttttggaatttctcatgcacttgtggattttcttctttcaaatgaggaaggacatatttacgtaatcgattccttgtatatacttcctttttattactcggatctatacgtggcattaaatttagcttattacagtaatcaacaatttcttccttcgttaccccaagtaacggcctaattaaatacccattatgaaaaggacgcttcactgcaattcctgcatatcctttcggagtactccctcttacaagacgcattaaaattgtctcgacttgatcatctccatgatgtccaagagcaacatatcttgcatcatatttcttcattattctttccaaaaatgcatatctgcattctctagcagcaacctgtgcattcattccgtattgctgttgatattgtgatacattaatccttatcgtttcacaaataattcccagttcttcacaaaggccctgcacaaaccgtaaatcctcatgagattcatcacctctaaacatatgatccacatgagctactacaattttcaactgtttttccgctcttttttctaataaataatataaaagcgctaacgagtcaggaccaccagaaactcccacaacaattgttgaatcattctttaatacatcatgctgctttacaaagtcatctactttttcaacaaatgtatctttcaacttcgtaatcacctttcattaaacaagaacagcaacgttagttgccttgtctacaatggtacaacttttacaaacattgtgcaaaaaaaagatatacaaaaattacatttttatcttacatcctccgtgtatattcacaaaattaataacattacctttttccacaaaaaaacctaggtattcacctaggtttttaaaatcaaattatagataaacattccacttacattttactgcgcctgcattcctacaatcggaatcgtagcccacttcggcatatttttcttcacttttgccactacaatagtcatatcatcatttatataaccatcacaagagcgaatcacttcttccataatgatatcagcaatttcttgcgggtcttcggtttgcaattctttaatttttcgtttcatccacaattcatgattctccacatgctgtgctccttcaaaaatcccatcgctcatcataataagaatatcgcccgtttttaattgttcacccaccacatcaacttcaacatcttcaatgattcccatcggcaaattacttgcttcaattttcaaaatattatttgcgcgtttaacaaaactcggcgtcgatccaatctttaaaaaccttgcactcgcatcccgcaaatctaccatagctaaatctaacgtcgtaaacatctcttctgtcgttctcaaagaaagaattgaattgatagacttaattgctatttcttcatcaatgcccgattggagtattttttgtaataatttcaccgtttccttactttccatatgagccctttgcccattccccataccatcactaattgcaagtgcatatttaccaacacttaaatccatcatcgcataagagtcacccgaaacaaatccaccgccttttgcagctgtagccaatcctgtatcaagagaatacgtcttcgccgaaccaaatgatattaaactatggccatttggataagaagacttttcttcatgtttaacgacaatattttctttaaggatatccgaaagcatcggtgcaactaacttttcacattcaccatgttcattagatgcaactggaattaacatttcaatatcaatacttcctctatctaaacaataaatatcaacatgctctacttcgacaccaaaatcacggaatgcttgcataatctgttcttcctgcacttgatgattttcacgctctcgttgtatctccttagcaaaatcctccataacctttgatacacctaatagttgctccgctactattctacgattttccttcatttgttttcgtaatttttgtccctcatagaagtgatctaattcacccgctactaaatccgtcacttttttccctctcacacaatgcttgtcccactcacgaactaatttacgattatgttgcagggttccttcttccgtttcattcattatttgtttcatataatcgtacgttttatcaaaattcactacccagcattgatcctttttaaagcatgtttgacatgttttcgcagtaattgtactcaaaaacaaatctgcttctgtctctttatcttcttcctctacatacccatatacagaaaagctattagataaagcagcaaatacatttgcaaattggttgattttatttgctgtaacatcacgcatccttcttaaatattgttgttggtcttgcgaatgctcttgtgtacctggcataaatttagcaatacgatccaaaacaagcttcggtgttaataagaagataacaatcgctacacctgactcaattaaagttgttacaatatttgtctgtttgtccacatataatgtaattaagcttgtcccaattaataaacctaaactaacacctaaacgcttcccttcttttaacaatccaccaagcaatccagagaaagcaagaaggctaagctgagacaagctagacacatttgctaaacttaatattagtcctgttacaacccctactgtggatcctgtggcagcacctgcaataaatgcaaatactagcactaaataccttgtaaaaatatgttgaatagaagcatcatatacaaaccaatctgttgtacccgttaaaacagatgctagtaatataatcaaacaaacaatttcttccgtctctaatgcctgttgttttcctttcctttccactaaaagcgggacgctttgtaaaaatatcatagttaatacgaaactaagcccagcctcaatggtactaacgagtaaatcgtacatggtgacagtttgttgcgcaaaatatacaacaactaagtgtgcggttaatgcggagataaatacttgaaatggaacaagtccaacagttttacgtgtaaatcgactaaagaagatattataaatgaagaaggtaaagatagatgcaaaggtaaaaaacaaattatctatcgataccgaaagagctcctcccattagagctaaaaatgctagcggcatcttatcccgcttcataacataaacagcagcaaaaaatggcagtgcaaacggtaaaatatttgttaatatatatgctcgtcccaaaagaaaaccaataacaacaataataaatccccatctaaagaaaacttgctcaaatttcattcgcaacttactcgtccactttattcctccaagctgactctcattcattgccaatgcacttgtattcatagtattccttcctgctttaggcatatttttaacaccacctgcatagtttaattactgtcattataaaagatgattgttggtttttttgtcaaaacaacagttttcacttttataatcgttcgactttttattcgaaataactctacagatatacacggtatgtaagttatttttgagattttaattaaatattcagaaaatatagggtgattttgtagaagtgttgtatatcttaatttatttaacaaaaaaagatcatgcaaatttgcatgatctttttagatgacccgtacgggattcgaacccgtgttaccgccgtgaaagggcggtgtcttaaccacttgaccaacgggccgttaaattaaatatagcggcggaggggatcgaacccccgacctcacgggtatgaaccgtacgctctagccagctgagctacaccgccatgtcgtcttatttaacggacaattagtatcttacatcagatactaattaaagtcaacacatctcaaaaacttttttaaaaatatttttaacatataaaaaagcaccctgagccatcactctgggtacctctctatatgttaaaaactaaacgtccttattatccgcgacgcgcgccacggccaccacgtttagactctgtgttacgctttaaagaagttaaacgatcttcgctatcttttaagaagcgtgccatcttttgctcaaatgtttctttcggagctcggtcgttaccgccaccgcgattatctctgttgaaagagcgattattacgttgtggacgtccagaacgttgttgatcaccaccgcgttggtattcaccgcgtggacgatctccttctgttttttcacgttctttcgcttttttgatagataaaccaatctttccatctttttcaacattaataacttttacttctacttggtcgcccacttttaagtgatcgttaatatcttttacatagttatcagcaacttcactaatatgaacaagacccgttaagccctctggcagctccacaaaagccccaaaatttgtaatacctgttactttaccctgtaacttgctgcctacctcgattgacataaaaaaaatgctcctccttagtggttaaaaagtcaaattttactttattatatataatcctaaaatatagtgtcaataagacatactctacttagaaacaggaaaaattatctcccctttaccagagaagaaataatcccttctagcaatctttaatacgtactcttcatcatttaacttttgaacttcgtcttttagacttttttctttattcgttaatgaatccagttcttttttcatgtccttaacttttgcttcttttgctttaatggaactgttttgttgataaaacgttacactaatactcgcaataattgtaaaagtaaagacaagaaaaaccgctaaacggcgataaagtcgcttcctgttctcatccgtttgtattatatgctctttaacaggatttggactctgtttttcgattgttctttgtctcagttccctcatttccgaggtccccctaacttcttttttatatgctcccatagttggaagatatgtcccttcaattttgctatatattgcaggaaccctatatgtttcactataaaaagtttaacacgattagggagaagtttccatatgagcgaagcaataaatcgaacaggccagaaaaaaactttccatatgaaaagtaatatccaaatcaccattttccataacacatgtccaattgaaagcagtatacgaaataagaataatataaatgcaataaatagctgcgctataataataacaggttttatcatgagtagctgtataattcgaacaaaaaaatatgttgtttgcataaaaatatagatgagaaaatttaacagcttcatgtatagtgccttcagtaagctttgatatgccgcaaaaccacataataatgccaaaaacacatatatacgtagctcagcttcatttacgagaagcaatacataaaagacggataatgcttggacaatccaaaataatatatcatgtataaatacaagccaacgtttacgttcttggcgctttaaaaaacgttgatatgtatctaaagacgctccaatccaagcacccattccaatcattgaaagcattgtatacaactgaattgttaagctcatttaaacaacttactaaagaaacctttagttttttccccttgattttcatcaatatacagcatctcattaactttccctttaatcgacacaatacctttttccacatctaaatttttcatttgtaaattttgaccacgaattgttaaaaaacccattacggtctctagtaaaaactcttcgctatcaaaactctctacctgcttcacaccggtaatatcaattatacgcctgccacgcataataatgtcatgctctacagaaacattttgttgattagaagacgtaggtgagtaaccattattcacgtaaatccccccataggtttttactagctaatagtaatgtatgaggggataaatgattttagaacaagccttcttccgcttttactttttcttcacgaactaagctatacatatttgctgcatcttcttttttagttgtttcttttaattcatttattttcacagtcactattttttgaccaaaacgaattgttaattcgtcagctactttcacatcagaacttgcttttgccacttgaccattaatagatattcttccttgatcagctacttctttcgctaatgttcttcttttaattaaacgtgatacttttaaaaacttatctagacgcatatcaaatccccctattaacgctctgtctgtttcgcttcttcccataaaacatctaactgttctaatgataaatctttcatctctttattcatttcagctacttttgcctccatgtataaaaaacgaccagtaaatttctcattagttgaacgtaacgcctcttctggatctattttgtaatgacgagctatattaacaaatgcaaatagtaaatcaccaaactcacccagcatctttttctcatccatatttgtaacctcttgttggaactcttgccattcttccaaagctttctctatcatcggttgcacatcaacccaatcaaatccaaccttaccagctttcttctgaatttcataggcgcgtagtaactgcggcaaacttttgggaacgccatttaaaacagattctttcacgaatcctttttcttgttttttaatttcttcccaatttgcaatcacttcatcagcgctgtttacatccgtatttccaaacacatgcggatggcgacgaaccattttctcagatagagttcgaatgatatcatctatagagaaccaaccttcatcttctccgatttgagcatgaagcataacttgtaataatatatcacctaattcttctactaagtgatcatcatcctcttcatcgattgcttccaacacttcataagcttcctcaattaaatatttctttaatgattgatgtgtttgctttttatcccacggacaaccatttggaccacgaagttccgcaataatttctctaagaacatcaaactgttgatacaaggacgcacgctcctgaactggcggcacgtacacactcgttaaattattcaattccgtttcatgatctaacatgtacaacggtaccttctttacttgttcaaatgaagttcctgcagctgttacgatatacacttcataatcatctggtaacatctccattaatgttaatttcacatcagatgcaacgaatgcatcatatacttggcaaaagattaaatgttgacgcagttctaattgccctctttcaaatgatgtagcatcaagtaattggaatccttcaatcggatcaatctttagacttgcaaacataggatcaaggaaactttgtccaccctcaattcgcacttcaacatttgaaacttctcctttttccaacagtagctgaactgttctttctgctacaagtggatgcccgggaacagcatagataatttctgtaccttcagcttgttctagcaatttattcgcaattgtttcatatacaatttcaaacgtatcatgtgcttcatatacagcatcaaaagacgtatattgtacgccttctttctccaattcttctataactggatgttctttcgttctaacaaacagatggtctgcttcttttatttttcgatatacacccatcgttagctgatctaattcaccagctcctaaacctaaaatagtaatgattccactcacaaccagtcacctctatccactcttcttcaatgaaccttcttttttctcttgtttcataacggttcctaattctttttttgtaaatacacgtaatttcaaaataaaaaacatatatgtcaatccgccaatggctacacctaacaacgcttcaagtgtcgcgcttcctctatgttccatatcaattactaatccagacatctgtaacacacgtgtgaacatcattaatacaaatcccatacagataccactaattactatccctaacatatttcgcttattgataagtgaccctgatacagctctcgtaagcaacaaagtatttagtccagagattataattaacgcacataaagtcgcaaaggctgcacctttcacaccaaaataaggcatgaatatataatttaacgctaactttaagcaacctccaaatacaacaaataatgctggcttaaacgtttgccccaatccttgtaaaatagaagctgtcgtaattgacaatgaactaaataaaatagataacgataaaatagataaaacatctgatccatcactgttttcaaacaacataatattcgtaggttgaataatacaagttagtccaatagctgctgcaagtccaataacacatgttattttcactgctaactttaccttttcttgaataaaggaaagatctcctctttccttcgccgctgtaataatcggaataagtgacaacgagaaagaagtcgtcacaacagtacctaattgcattagcggaatacttctatcataaacaccctttaatacctttgcattttcagcctgttctcccgcaccaataagtaagctgtaaaaggacactgaatcagccatctgtataaaaataagcactaaattactaacacaaatcgctaacccctgccaaaaaaggattttaactatcttccttttacccttaattctcgctgcacttttgaagaatatagaacgaaaatcttgacgcatatacaatataagtacaataatcccaataagaccacccgcaattgagcctaacatagctcctgcaccaactgtatataaatcaaatccgtgagcaattaggaatagcgataaaaatacaataatagaaactcgaattgtttgttctattacttgcgaaacagccgttggcatcatattattaaatccttgaaaataccctcttgctacagacaaaaatggcatcaataagaatgaaaatgaaataacacgtagtaacttatctaagtgtatatcgcccatagctaccgcaattgtttcggccccaaaaaacaatgtaaagaagcctataaaaccaattcctaataagaaccaaaaagatacacaaataatttcttctgcttctttttgttttccccgctctaatcgttctgcaaccattttcgaaatgataacaggaaatccataagtagctaaaattaaacaaaatccataaaacgggtaaatttgttggtaaatataaaacccaatatcccccgctatattttgatatggaatacggtaaaaagcgcttaatacttttgtaacgaaacttgcaatcgttaatataatagccccacgccaaaaggcttgatacttcttcgcttccatacaagaaaactcctttttctattctcacctctcgtattatatcataaagaaaagaacaaactcccttcccaacacgggtaataatgagttcctacacgttaaaaatattcaacgaaaaaaggtagcaaagtgctaccttcattcaatatacatatatctccaaataattgatttctcaaaaagaaagatcataattaggaaagattgctacttctaaaatcaatatacccttactgttccatttgtttcgctaagaaactggcagcagtattaaccgctttatgctcgatctcgcttataatagcttcttttgaaaaaataatgacggctccaatcggatctccgtttgcaacaattggtccaactgtataagaatgaaccttttctgttacaccatcaataatggaaatatcactttcatccgtcataataacagactttcgttcttccatcgttttttcaattaaatcgccaacacttttatttaagtattcttttttcgatacgcctgatactgcgatgatagaatctcgatcacacacaagcacattatgtcctaagctgtcatataaagcatcagcatattcttttgcaaaatcacctagctcactaattggagaatacttctttaaaattacctctccatcgcgatcaacaaatatttctagtgggtctccttctcgaatacgtaaagttctacgaatttccttcgggattacgaccctgcctaaatcatcaattcgacgtacgattccagttgctttcattctaatgctgcctcactttctactgatgatcaaagtggtgaatttacctgttcatgtaaaaatcaccaactgttagatatagtattttacacattagttcttctatgcacgtcgaattgtatttttttatcttattttaggcatttattacttctttttttacatctggtaagccttttaataaattttcagcaatcgttaaccacttcgatgtctctaagccatttgttttcataacaattttcaattgtgatccttccattcctaaaccaatcatacgtccaaaactatttccgagcatgaataattttccaccatcaatattttgacttgcttgttcagaaaacaggaatgttacttcaaatttattctgcttaattaattcaatttgttctttcattgccaacactttaatatttgcaatttgtaataaataaccaacttcttgtggataatcgccaaatctatcgatcatttcttcctgcaattcttcaatatcctcaattgcagaaacacctctaaattgtttatacatcataattttttgcttactatctgaaatataagcatctggtaagtatgcatctacctctaagtcaatttcaacattaactatattttcagccccatctgttcctctacgctgttcaattgcatcttttaacatttgagaatatagatcaaatccgacagaatcaataaatccatgctgttctgcccctaacaaattacctgctccacgaatagataaatctctcatcgcaattttgaaaccagatccaagttccgtgaactctttaattgcttgtagacgcttctctgcaacctctgacagcactttgtcacgtttatatgcaaagtatgcatatgcaacacgattagaacgtccaacacgcccacgaagctgatacaactgtgataatcccatacgatctgcatcaaatacaattaacgtatttacattcggaatatctacacccgtctcaataattgttgtacttacaagaacatcatgctgtccttctaaaaatgatagcataacagactctaattcgctttcgttcattttcccatgtgcgtaggttacgcgggcatctggaactaacatcgaaatttcatctgcttttctttcaatatcctctacacggttatataggaagtaaacttgaccacctcttgcaagctctcgctctatcgcctctcgcattaacgctggattatactcgactacatacgtttggactgggaaacgattttctggtggtgtctcaataacagataagtcgcgcacaccaagcatagacatatgaagcgtccgcggaatcggagttgccgttaatgttaatacgtcaacattcgccttcaattgtttaattttttctttatgtgtcacaccaaatctttgttcttcatcaataataagaagccctaaatctttataagtaacatctttagataaaatacgatgtgttccgattacaatatctactgttccatcctttaagcccttaattgtttcattttgttgtttcctcgtacggaatctacttaataagcctatattgattggataatcttgaaaacgctctcgaattgtttcatagtgttgctgcgcaagaatcgttgtcggtactaaaattgcaacttgtttttcatccataatcgctttaaatgccgcacgaatagccacttcagtcttcccataccctacatcaccacaaaggagcctatccatcgggcgtccgcgttccatatcttttttaatctcgtcaatagaacgtaactgatcctctgtctcttggtatgggaaagatgattcgaactcttgttgttctgccgtatctggcgtatatgcatagccttttgaagcttcgcgctcagcatatagtttaattaggtcatccgcaatgtcttgtacagatttttcaactttcgttttaacctttttccaatcattaccacctaatttgtaaactttcggatccttaccttcagatcctacatatttttgaacttgatcaatttgttcaattggaacgtatagcttatcattaccttgatatttaatatttaaataatctttatgaacaccattaatctctaatgtctcaatacctaaaaatttacctataccatgatttacatgaactacataatctccaacttttaattccgaataacttttaatacgttcagcattcgatagcttttgtttacgttgtgattttttaactttcttatgaaaaagctccttttcagtaatgacaacaagcttttgcatcggcatttcaaatcctgcatgtaaatcacctacagcaatttgtaaccttccaggcaataaaatatctgtaccttctacaatatctgcctcaatatcataatcacttaaaatatgttgtaattttttcacacgttcatcatctgttccgagtacaacagtcgtaaaatgcccttcattccatctatcaatttctgtttttaacaaattcatctgtccatggaaatcttgcattgttttacatgttacattaacaatattttgcggatgtgtgtgtgcgatatgacgcaagaataacgttaaatatacaaaacttctttttttatgatgaagaaacccctcgaatgggtgagagaaagataaatcttgaataattgttccttcaccaagaagtgatatataccattccgcctcttctgtttcaagatgtgatgctgtttcttgaatacgggaaatctcatctaaaattacaacaccatcttctggtaaataatctatcagactagcaggttctttatagaaaatagataagtatttaaacatctgttctatactttgcccgtttttcaacatctcaatttcatgacttaccgtctcaagcactttagtctttagtttatcatcagaaagtttttgcatcgtcttagtcaagccttcttcaagatgctgaattcctgattttaattcttcctgtgaaaataaaaactctgttgccggaccaaacctaacgttttcttttttaccttgagaacgctgttcatccacatcaaataatcgaatagaatcgacttctgtatcaaagaattcaatacgaaatggtagttcttcagttaaaggataaatatctaatattcccccacgcaaactgaactcccctggagcttctaccatcgacttacgttcatagccaatatgatgtaaagtatgcaagagcgcatctaaatcaatctcttgccctagattgatttcaacttgcttttgcttccacaattcttttattggtaaaaatctacgcaatcctgccactggcgctacaatgattccattctctcccgcagccaagcgatttaacacttctatacgttgcgccttcaattctggacttgcaactccaatttccgatgctatcagttcattcactggatataaccacacatctttttcaccaagtaacgccactaaatcttcatgtactttttgtgcttggtataagttatgtgtcacgattaattgtgatttttttgtttttttatataaagccgccattaataatgaacgagaagacgttgccatccctgatataagttgttcttttaacccatcttctaacccattaataaccgattgtatctcttcatttttataaaattgctctaataaacctatcatttttaaaactcctctcaacataaagagcaagtcattctattttatgcaaatattttggaaaaggaaaacagaaaaatgctttggacatgccaaagcgacaacattttattgcagaaatttttcatactcataatactcaggataagatgcgagcgtttcttgacacgattcacaaatcgtttttatatatatatttccattctcatgaaaatgaatcatttctactacttcttgctccgttagttgaaataaaacgtcgctatatactttttctgcgttaatggagcctacattacctccgcagtgtctgcaataataatacccttccatactagcctcctaaaaattcaattactactagtatgggtaaaacaaaagagaaatattcccaatctcatttttaactattgaaagtattcatgatttgaagaaaaggcttatttagccactcttcacatgcatccgctgctttttcaatagaatggttaacatccggaatctcttcagatgtaaagcgtcctaatacataatcgactaccttcattccatttttcgggcgatcaattcccatacggatacgttgaaattcttgtgttcctaagtgcgaaatcgttgactttacaccattatgtccaccagcactacctttcatgcgaagacgcaatttacctacaggaatgtctaaatcgtcgtacataacaacgaagtcctcaacatcaattttataataatccataagtggacgaatactttccccagataaattcatgtatgttagcggctttaataagattaccttttctccattaacaaaccctgcaccaaatacacctttaaatttttgttcattcaaagaaatgttccaacgcttcgcaagttcatcaatggccataaatccaatattatgccttgttaattcatattctctacctgggttcccaagtcctactatcaatttcattcttgtaccactactttcttttttcgatacgaaaagacgtaaccaattttggttacgtctcattctatccaattaattgaataatacactcacagattcttcttcgtatacacgaatgattgcttctccgattaatggagcaactgaaagttcatgtactttgtcgattttcttctcttctggtaatacgatagagttcgttacaactaactctttaatgtttgaattttgaatacgctcaattgctggaccagataatactgggtgtgtacagcaagcatatacttcagaagcaccgttctcaacaagagcgtttgctgctaatgtaattgtaccagctgtatcaatgatgtcatcaattaaaatcgctgttttgccttcaatattaccgataatgttcattacctctgaaacgttcgggcgaggacgacgcttatcaataatagcgattggcgcttttagacgatctgccatttttctcgcacgagttacaccaccatgatcaggagacacgattacgatatctttaagaccttttgtttcaaagtaatcagaaagaatcggtacacccattaagtggtcgattgggatatcaaagaacccttgaatttgtggagcatgtaaatctagagtgattacacgagttgcacctgctgtttcaagcaagtttgctacaagtttcgatgtaattggttcacgagaacgcgctttacggtcttgacgcgcataaccatagtaaggaataacaatattaattgttttcgcagatgcacgttttaatgcatcgatcataataagtaattccatgatatgttcgtttactgggaagcttgtagattgaataatgaatacatcgcaaccacggatactttcttcaatgttaatttgaacttctccatcactaaaacgatcaacagaacattttcctagtcctactccaatatgctttgcaatctgctcagcaagttccttattagagtttaaagagaatactttcaaattagaatttagatattgagtcgacatctagattaaccctccacattattatgattttttcttattcagcaattgatcaacatagtcttctttgttaacttgacgtgcacgtgctaccgataatgcttttgatggaacattctctgtaattgtagagcctgccgccacataagcaccatcttcaactgttactggagcaacaaggtttgaattacatccaataaataccccattaccaatcacagttttgaatttattcttaccgtcatagttcaccgtaattgaaccacaaccaagattcacgtcttctccaacttgtgcatccccgatataactcaagtgtgaagctttacttctattaccaaagacagtttttttgatttccacgaagtttccaacgcgtacttcgtctccaataactgaacctgggcgaatatgtgcaaatggaccaaccgatacttctgtaccaagcttactatcatgtacagtagattgtcgaattgtcgtacgatctccaatttcactatcgcgaattactgtatgcggtccaatttcacaatcagaaccaattacagtgttcccctcaataattgttcctggatgaagaactgtatcgctaccgataattgcatcagcagaaatataagtgttacttggatcaataattgtaacaccatttaccatgttctttcggttgatacggtttttcataataatttccgcttgcgatagagcgactctgtcgttaacacctaacgtttcatcgaactgctctgtttgataagctgatacgatatgaccttcattttttaaaatctcaataacatctggaaggtaatattcaccttgcacgttatcatttgaaactttagaaagtgaagcaaataaagccttattatcaaaacaatacgtacctgtattgatttctttaatagctaattctttctcatttgcatctttatgctcaacaatcttttcaacatgaccattctcattacgaacaatacggccatatccagcaggctcttctatgtatgctgttagcaccgtcgccattgctcctgcttctttatgttgctgaagtaatgcttccattgtttcagcagttattagaggcgtatcaccacaaataactaaagttgttccttcttcatttgcaagtacacttgcagcttgatctacagcatgtgctgtaccaagttgttctgcttgtaatgcaaattcacttacgttccctagctgttcttgtaccatttcagcaccatgtccaacaaccgttacaagtttctgcaatcctaattgagatacttgatcgactacgtgttgtaccataggttttccacatacaggatgcagcactttgtatagcttagacttcatacgtgtgcctttacctgcagctagaatcactgcaaatctgtttgacatatagaccctccatcgcaacctatttatccattaaagatattatcctaaatcatcatatatttcaagaaacacattttaactattaaattttaccataattcttataagatgttttactctttagtatcttttttaagaaataagctatactatttaaaatgattttgaaaaaattagtagtttcttctttttatgttaataaattatacagtttccaaatataaagcaaaaaaaacaaacccctgtaaatgcttacaggagtttgctacaaaattataaggctttttgtcaaaagcccttttcattcgaattttacgaagcacctgcttcttcaaactcaacctcttctaactcgcctaaacgatgatactctgttaaaaccgcatcttgaattttagagcgtgtaccagaattaattggatgtgcaatgtcacggaactctccatctggagtacgtttacttggcattgctacaaataatccattattaccatcaattacacgaatatcatgaacaacaaattcatggtctagagtaatagaggcaattgctctcatgcggccttctgtgtttacgcggcgtaatcttacgtcagtcacttccatcttgtgttcaccacccttttctaaataagcgatatatttgtataaattccacaaattttctattttccctttaattttttaaaaatttttaagataaaaatttttaaagtagttgaatatagagattagtggaggttatcgcttacaaaaggttacttaactagggcgattacttcaatttcaacggaaacatctttcggtaattttgctacttgcacacaagatcgagctggtttatgagtagagaaataagagctatacacttcattcacagcattaaaatcatccatgtcctttaaaaatactgttgtttttacgactgtatcaaatgaagcacctgcttcctctaataccgcttgtaaattttgaaatacttgttctgtttgtactgttacatctcctgttacaagctccccatttgccatcaatggaatttgtcctgagctatagaacatgttatttacaataatcccctgtgaataaggtccaattgcttgtggtgccttgcttgtttgaacaactttcatacttttcacccttttattatttattttactctttaaaaatagtgtacgaaaggcagtttgtccatctattttataatctataaataaaataaaaaagatagagctatctgctctatcttttattccgcctctacaagcccttcatcaaatggtgcaagagaataattccctttttccacttgaatcgttttttctttcacatcaacttccgatagacgaattaatgatacaaaattattaattagtcgttcttcaatatctgtggattctactaatacaccaataccaacaacattagccttgaattcttctagcatactcatcataccttgaattgttccgccagctttcatgaagtcatcaataattaaaacattcgacccttctggaagactgcgttttgctaacgtcattgtttgaattcgtttagaagaacccgacacatagttaatactaacagtcggaccttctgttaccttattatctttccttgcaattacaactggtacatctaagtaatttgccactgcataagcaagtggaatccccttcgttgccaccgtcataactgcatcaattggttgcctagcaaaaacagaagcaaacaaacgacctgcgccattaatatggcgaggattactcaataaatctgtcatgtataagtaaccgccaggcaaaatacgatctgggttttcaaataagccacaaagctcatcaataattagatctgcctcttcttcacttatatacggtatatatttcactcctcctgctgctcctggtatcgtttgcaatgtgccgaccccttgttgttcaaacgtttgcttaataataactaaatcttcactaatggaagacttagccgattgatacctttcagcaaaaaaagtgagagatactagctgacgagggttttgtagcaagtaataagtcatatcgactaatcttgtacttcttctaattttcatactctcacctcaaatcacgaatattctaaacaaatcataacgtattatacgtctttattcaagcgtttctcgctctcctaataaacgtaccgcatagacttgttcacaaaatccttttaatccgttataaatgcgatgcattcgtgaatcatggtgtacaagtccaaatacagttggaccacttccactcattaatacagcatccgctccaaatcgcttcatctgtgatttaatacgggcaacttcaggatgcattccaaatgttacatcttctaaaacgttaccaacagtatcacaaattcctttataatcaccagaatttatgacatcaaccattttatctacatttggatgtgtaactcgatttaactttaaatttccatacacatcagcagtagatacacctatatgtggtttcgctaaaataacccaacaagaaggcggagtctttatatgctcaattttctctcctcttccagtggcaattgctgtgcctccgtatacacagaacgatacatctgatccaatttctgcaccaagctctgctaactcatcaattgtaagctctaaattccataatttattaagaccacgtaatgtcgctgctgcatcactacttccacctgctaatccagctgctactggaatcgttttttcaatagtaatagatacacctttttttacattaaacttctcttttaataatttcgctgcctgataagctaaatttcgttggtcgtctgggacataccgattatgggataaaatttcaatacggtcttctgctaattccgttagttctagacgatctgctaaatcaatggttgtcataatcattttcacttcatgatatccgtcttgtctttttcccagtacatctaacgacagattaatctttgctggtgctttcactagtagcttcaatctattcacccactctatgtactcaatcttttatcgtttattttaccataaatttatagtaagacgatgacacttccctaattataacgaaaagcattcagaatgaaactacttatgtaaaatgatggcaccttttagagtacaaaaagccgaggaatgtctcctcggctaccgtagcacagaaagtatcttacaactactggtttcgtttcattaattgctgttctgcaatttctatagcacgtttcaccatgttaccagcatctttcgcacgaattccgccccatccttctttctgaacaacatcataaaagccaagctcttttgctagctcttctttaaattggtttgacatgacacctcttcgtctactcaatgcagagtccctccttattttgctacggtatagttagtatgcaaaataatatagcttttcatttatgggaatatatgtaatgatatatggattataaaatgacctcattatgagggtctccataaaatgttaactctactgtctctgttaaaacatctgcataactataagatacacgttgcaacgcatcttcttgttgatccaattgtacaacaaaaacggaacggtatgtttctgctagtacacctgattgctccacagtttttcttcttccactatttgcttttaacataagtcgctgtccaagatggtgatctaattcgcttttaatttcatctaaacgttttgacatatacttcgctacacctcgctgtaatttagattgaacacttaaagcacgatatatctatcctaattattaaccgcgattcacagctaatatcatcctgcgtttgaatagatagaagaaatactatattgtaaaagtatcattacgtagtctttacgttcttacctctttttatccaaattcatttaaatccttccatacaaaaagcaagatacatatgtatcctgcttactcttcgtaatgttgaaaaggtaatcccgttcgtaaaatccctctcgtttcaattccacctagtcccttttcaccagtaattgtattacgtacgacatcccatacattgactctctccataaatgaagtaaaactaattttaccaactacatatacaggatctagtgcatgaatattaattctagatggtgaactagcgaaattggcccctgcacgaattagtgcctcaaaatgtgattgacatgccccagcaaaaataacaagttgatccaatgatggatatttttttcgcacttcacgaacagcctgtacaaaatgccttgaatgcctatatgccgctaaatctcccttcactccttttgattttgtatatgcatcatgccctgtaataacgagaatgtctgggcgaaagtgatctattaagtctactactttttcatgcatcaccgtttctttacaatgaataccttgaacaggaacgccaattttattatataaatctaagcacttgcgcaaatataaagggtctccatctatatgcaatacacgtcccggcatttgaaaataatttacctcacttgtgtatccaccagttgaagtatgttcatgcctttgtttcatcagtacataatcttgttgaaacaaacgatacgtgcgctccattgtttctttctcacgcttcaccctttttttatgttctctttgatctatactaattaaatcttcaagtggcgcatccgccaccagtctaatttcctctccaaacaatatagctatctcgccttttatttctataatacgaaaaagaatatccctcttatgagaatatcgttccactaattctccaacatgtaaaaccattctcctacctccaaactcattaggccatcttacctgtttttaaagtatgaatttagagagcgaaaggtgacaaaagggacagttcaacttgaactgtccctttcatattcttatgataatttatgaagaactaatgcattacttaatgttgcaaactcttcaatagatagcgtttcgcctcttcgctttggatcaattcctacttctgttaaaattcgatccaataactccttatctttcgggaaaccatttaaattatttgataaattattcattaaagttttacggcgctgtgcgaaacttgctcgtactacttcaaagaaaaacgtttcatctgtcacctctacaaccggtttaggacgctttagaaggcggataattgcagaatcaacgtttggctgtggtacaaacactgtacgcggtacagtcataactgtttcaacctctgtatagtactgaatggcaatcgataaagaaccatactcttttgttccaggtttagcagctaaacgatctccaacttctttttgcatcataacaacaaatccacgaactggtaacttttcttcaagcaatttaaataaaattggcgttgtaatatagtacggtaagttagctactaccattacatcttgcccttcttcaaattgctcattaaatacttcatgtacatctgcttttagtacgtctttattaataactgtaacattaccatatggcgctaacgtctcatctaaaattggtaatagtctttgatcaatttcaaaagccactacttttttagcacgcttcgctaattgctctgttaatgcaccaatacctggtccaatttcaattgcaccactttctgaaccaatttctgcatgatcgacaatacgatttaatacatttgtatcaattaaaaagttttgtcctaaactttttttgaatgaaaatccatacttttcaacaatgtcttttgtacgatttggcgttgcgatatccttcattttttttcctcctgtattacttgcttataagcttctgcaaatgattcctttgaaacttgaaacatctgtaatcgtttatgtaactgttttgcatttgtataaccaatctttaataacttacccattctttctctgcggctctttgccatttctccgcccactaagcctgcatcgactaaatcactccaactaatttcacttgtgtaagcttccatttcttcatgtatattctctagagcacggcgaatcgactcattagaagcatgttcaatcccaacaccctttttccttttagcaagcgcttcttccttcggtaaaaaagcatgcttacagccaggaaccttgtcagaaataatttttcgaatacgctctccaggataatccggatctgtgaaaataataacgccccttttttgctgcgctaatttaacttgctcaataacatgatcaccgattgctgaaccgttcgtttcaattgtatccgcatcaacagcacgcttaatcgcaactgtatcatctttaccttctacaacgataatctcttttattttcatgcttgcctccacactcatttcgtctctacttagtaaaacaaaaaaatgacgacttttccattattattttccccattcttatattttaaaaaatagaatagaaaaatctttgttctctgtccttattgtaacacttcatcattcacatttattttcttgattacttctactagtttttctcaaaataaaaaagaacaggtttcccccgttctttttattcaacaccaaataaaacttttgcatttttagttgtcatttctgctacttcctcataagaaattccttttaaattcgcaatttcttctgctacgagttttacataactcggttcatttcgtttcccgcgaaatggatgcggcgttaaatagggacaatccgtctctattaacaatttctctaatggaatctccgtagcaacttctttcggtttcttagcgtttttaaatgtaactggtccacctaacgaaattaaaaagttcatatcaacacatcgctctgctacttctacgctaccgctaaagcaatgcataatgcctcctacttcagctgcattctcttcttctagaatatcgacaatatcttgagttgcatcgcggttatgtataataatcggcaaatttacttttttcgctaatgcaatttgtttacgaaatacttctttctgtatttcttttggagacttatcccagtgataatctaagcccatttctccaagtgcaacgactttaggatgagaagcaagttcttctaaccaagctaaatgttcttctgtcatgtcgattgcatcaactggatgccagccaaccgcagcgtaaataaaatcataggcttcagctaattccatcgccttttttatcgttacttcatcaaaaccaacaacaactgtataagtaactcccgcttctttcattcgggcaataacctcttgcaaatcttcttcgaattgctctgcattcaaatgtgaatgtgtatcaaacaacataatacataactccttttatattgaaatcaagtttattctacaaaaataagttctttaataacttaacgataacaatactacaatcttaatgcaaaaatagagagtgtaaaaagaaaaaagacgcttcacacatgttacacgtgaaacatctcttttcttgtcttaattacttgatttttgtaccatttggtagattttggtcaattgatgctaatgacaatacgccattctcttcacccgctaaaatcataccttgcgataattcaccgcgtaattttacaggttttaagtttgttacacaaataacctttttaccttttaagtcttccggcgaatagaattttgcaattccagaaacaacttgacgcttttctgtgcctaagtctagttgaatttttaacaacttgtctgcttttttcacaggttcagcagatagtacttcagctacgcgtaattctactttaaagaaatcatcaattgtaatttcttctgccttcggttcttcttcttttttctcttctactttaggagcagagcttttcatttgttctttaatgtactctacttccacttccatttctaaacgagggaaaattgggtttcctttttctacttttgttccagctggaatgcagccaattgtagatagactttcccaagatttatgagcttcatcagtaaggccaagctgagcaaacatcttgcttggtgctactgttaagaatggcataagcataatacctgtttgacgaagtacttctgctaaatgagccattacagaagctaacttttcacgatcattctcatcttttgctaatacccatggttgtgtttcatcaatatatttattcgtacgactaactagttgccaaatagatcctaacgctacagagaactccatattctccattgcttcttctacttttttcaaagtatcttgtgcaaacgctactaacgtttcatcaaattccgtcacattttctttaaatgcagggatttctccgttaaaatacttatcaatcatagctactgtacgatttaataaattacctaagtcatttgctaagtcgaaattaatacgctccacaaatccttctggtgtgaatacaccatcagatccaaatggaacttcacgaagtaggtaataacgtaatgcatctaatccgtaacgatcgattaatgtaactggatctactacgtttccttttgacttactcatctttccatccttcattaaaatccagccatgagcaaagactttcttcggaagaggtaaatctaatgccattaaaattatcggccaataaattgtatggaaacgaacaatttctttcccaactaaatgcacatctgcaggccagaattttttatatttctcttcatttgctgttccataacctaacgccgtaatataattagatagtgcgtcaacccatacgtaaataacatgttttgggttaccaggaacacgaactccccagtcaaatgaagtacgagaaaccgctaaatcttctaatcctggtttaataaaattattaatcatttcatttttacgagactccggctgaatgaaatgtggattatcttcatagaactttaatagtctgtcgacatatttacccattctaaagaaataagattcttcacgaacaagttctacatcatgaccactatctgggctttttcctccaactactttgtcgccttccataattggatctactaattgatgctctgtatagaacgtctcatcttgtacagaataccaaccttcatattcatcaagataaatgtcaccttgatctactaattgcttaaagattttttcgacaacatctttatgacgatcttcagttgtacgaataaaatcatcataagaaatatccatcttctcccaaagccctttaattcctgcaacaatgttatcaacatatgcctgtggcgtaatatttaactcttctgctttcttttggatcttctgtccatgctcatcagttcctgttaaataatgcacattataaccttgcatacgcttatatcgtgccatcgcatctcctgctactgtcgtataagcatgtccaatgtgtaattttccacttggataataaattggggtagtaatataaaaggacttattttcctctgtcattgttttggacctcccgaataacctcatatgtatttataaacagtatatcaaaaactcatatataaagtgaaactttaatcagtagggtttttgttcctccctactaattattagcccacattaattgggcttttacgagcagcccaaatctaacttatcttctttacgccaacctaattttaaatttaggtcttaatgctcgatatctttatcatctattgctcatatttcacaaaaatatacaatctccacttttaatttattattttttcagaaaataatgtaaataattgtggaatttcctctcaatctattatatataagaaataagaaatctataaatctttttaaaaaatatagaatttaagaattgacggaaatgtaaatgattggtatcatatgtccatagggtattttgtcgaaaaatgacgaatctaaaaatagactcgaaacttataaactatttatttaggaggaaaaaaattatgaaatctactggtattgttcgtaaagttgatgaattaggtcgtgtagtaattccaatcgaattacgccgtactttaggtattgcagaaaaggacgctcttgaaatctatgttgatgacgaaaaaatcatcttaaagaaatataaaccaaacatgacttgccaagtaactggtgaagtatctgacggtaacctttctttagctgaaggtaaaatcatcttaagcaaagaaggcgctgagcaaatcttaaacgaacttcaagattatatcgaaacagcaaaataagcttctcaattatgagaagcttattttttatcgacatgatagatttgatatacatctcttttcgacaaatctcgatctttagcgactgttttaatcgcttcttttgaattcatacttttttcatttatataatattcaatatgatcatataccgaaagagattcccaccattgttcttctggaacaggttcttctgttgaaccagctactaaaatacaaaactcaccacgtacttcattttgcttcgtccactcaattgcttcttcgattgtccctcgaataaattcctcaaattttttagttaactctcgacataatacaatctctctatttcccaacacttcctgcatcgaaattaaagtatcgtctaaacgatgaggcgcttcataaaacatcattgtagtttgtacataacgaagcttttctaactccatctttcgttcctttttgtttctctgcaagaaaccatagaaataaaactgctttgtttcaagaccggatgcaattaatgctgtaagggctgcatttgctccaggaagcggaattacatgatattgctcagctactgcctcaacgacaatatcgtaacctggatcagaaatacacggcataccagcgtcgctaacaagtgctacattctttccatcctctaatttctctaatagtttcttcccacttacttctttattgtgctcatgataactcgtaacaggtgtttcaatttcaaaataattacaaagttttttcgtttgtctcgtatcttcagcagcaattaaatcaacttcttttaaaattcggattgcacgaaatgtcatatcttctagatttccaataggagttggtactaaatataaaactcccttttcattttgttgaaagcttttttgttgccacatagcgttctcctttttgcatatatgcctctttttgttttctcgttaattgcttaaagtaatactccgcttgcatagctgtacgcttatcatcgtgggtctctacatattttaaaacaacaggaagcctgacgcgtgtatacttagcccctttgccgctattatgagtctgaattctcttttctatatggtttgtatatccagcataataacttccatcagagcactctaccacataaaaaaagtgcttattcttctccatataaaatcgaacgtagctcctttgtatattcgttattgctctcatatacaacgagaggcggtaaaattttcaaatctgcatttccatccttaattccttcaattaacaatgtatttgcttcttttccaaccttaggataaacaaattgcacacgctttggttcaattttatatttacgcattaatgtgacaatgtctagtaatcgccctggacgatgtacaaacgctactttcccaccttgttttactaactgactacttacagatacaacatcttctaatgtacacataatttcatgacgagctatcgctaaatgttcattcatatttttctctgaagtttgaggtgtttgaaaatatggtggattacatgtaacaacatcatattgatgacgcccaagtttctctggcatatctttcaaatctccatgtatgaggtgaattctttcctccaacccattgtattgaacacttcttactcccatatcatataagcgttcttgaatttccaccccagtaatatttccttttgttcttgtacttaatagaaggggaacaaccgcgttacctgtacacaaatcaagtaaattccccttttgaattggtacccatgcaaaatctgcaagtaaaacggcatctaaagaaaaattaaatactgatgggctttgtataatcttcatgtcttgtgctaataagtaatctaaacgttcatcttcatataaattcatatactgctccttttcttacccttaacctaccctatttcatgtataaaaaattacctttccaattataattggaaaggtaatttcactttttatttaagaatgacagacagaataaacaatctccctctttacgtacacttccataatgtagattgcaaatatgaaaaccttcttgatacagtctcgctaaattgtcatagccttcaccaatatctgttttcggcttcacttctttacgtttttgagttttttgtttttctttattctgcacttcttcaaaacggtgtcgcaaattgttattttccatttttatatgctggttttcttccaacaactctgcaagatgctgttttaactctcccaactgtttatataaatgtccaatttgctcttccatactagaaaccgattcaaaaatatcttttttctccacaagcacccacctcattaatctgtggtttgactcgaaacgacccctttattcactaactcatctaacgtatattctactatccgttccttgtctactagttccacttgaattaatctttctaaaatatttaatccgataacacggccagtaccatgcggggtttgtatacgttgatctaaatcaggaagttgttcctttgctgcctcatattcatcattctcatattttaagcaacacattaagcgaccacataaaccagagatttttgcaggatttaatgataaattttgatcctttgccattttaatggatacaggttcaaaatcccctaaaaaagtagaacaacaaagcatacgaccacatggaccaataccacctagcatcttcgcttcatcacgaacaccaatttgtcttagttcaattcttgttctaaaaattgcggctaagtccttcactagttcgcggaaatcgatccgaccatccgcagtaaaatagaaaataatcttattacgatcgaatgtatactctacatctacaagtttcatatcaagattatgctctactaccttttgttgacagacttgatatgcttctttggcagcatgtttgttctcttcaacaatggtacgatcattttcatttgcaatacgaataaccttttttagcggtaatacaacgtcgttttcatcaacttgttttttggtaataactacttttccgtattcaatacctcttaccgtttctacaatgacaaactcattttcagagatatcgaactggtttggatcaaagtaatatacctttccggccttcttaaagcgaacacctactacatcatacaaaacggtcatccctcctgcaaccgcaacactaactgttcgaacacaagctgcgcatttacattagcgttgattctattttttgcctctaatatattaaagagagctgatacaatgcgcttctgagcataggaaaacgattcaaacatctctttctgatcatgaaaaacaagacgatcttcttctccaagttgaacatataataaatccttataaataaggagtaacatatctaaaccttgctgtaattgttctttctctccaaagtgttttccccatttttcttgtacaaaaaaaatagaggttttatctttttcgagcgcttcacataattttatcactaaagctcgtgcttgtgcaaaccattcatcactacataaagctaaagcttcatcaaaactatttgtaagttgagcagcaagtgtcgataaagatgctgtaatcccttcatcctgtaatcttctaattaaagattccgtaggtaacggtctaaacgtaacaacttggcaacgagataaaatcgtatttaaaatttgatgactttgttcagtaagtaaaatagcagttgtatcactacttggttcttctaaaaatttcaaaagtgtatttgccgcatttgctgtcatacgatctgcgtgctcaataatatataattttttatttgcctctaatcctgtttttgaaaactcttcttgtaaatcatgaatttgctgctttttaatagataatccgtctggttttacaatatgtaagttagggtggttacctgaatcaattcgcttacagtttgtacatacatggcagggctctaccccattccgctcagaacagaggaaactctttgccatttgaattgctgtcgcaaactttcctgtccctttccctccctctaacaagtaagcgtgggatatacgctcttttgcaatgctattcatcaacatttttacaccgatgggttgtatagcagaaagctgctcccacgtcttcgtcataatgcatacctcacttatttcattctttccttctattataacaatttatcttctataatctgaacaacttcttctataagtttttccatcggctgatcagcatttaccaatacaatacgatccgagaaacgttctacaacttgtaaatacccttcgcgcacacgtttatggaaagagatatcttccatatctagtcgatttacttcacgtcctgcatctttttcaatccgagccaaaccaacctcaggctcaatgtctagataaattgttaaactaggcatacagtcctctgttgcgaaacgatttatttcaaataccttatccatacccaatcctcttgcatagccttggtatgctaaagagctatctataaaacgatcacataacacgaggtagttctcattaagtgctggcataactttttctactaaatgttgtctgcgcgcagcagcataaagaagcgcttctgtacgtgcttccatcatcgtatattcttgtttatgtaaaatcgtcctaatgtcctcagaaattgcaataccgcctggttcccttgtcgccattaccttttgtgcttttttttcaaaatatggcaataagcttttaattaacgttgttttacctgaaccttctgggccctcaattgttacaaataatcccttcatcctaaaacctactttctatatcatacactttcatatatttcgtattaccttgaaaacgagctcctgctctctctaaatacataatttgctctttatgctctgaagtaattctctctccatacataatcaatggaattccaggtggatacggaatcaccatttccgccgctatcattccaacagcctcttctatagatactatctttgtttcatatccgtctagttgtttatacgtatacggtaaaagagagaattcacctttataagtataacgaatagattccctcttgtctttcacctcataatgttgcaatgctactcggatcatctctataaccttcatatatccctcatttacttgtaagggtaaaataaataggacattgtacggatcagccatctctgtatatataccgaccttttcaaatacagactgtaattcgtaccctgataactgacaacgagtttgtacggtgacctttaactcatcttgcaacggatattctaaaatggcgatttggggaatagaacgtaattgttccttaaatcttcgtaaaaactcaacaatttcactgtgaccttcttcttttatacgcgccattgtaaagcgtgctatatccaaggaagccataattggatacgatggactactagattgtagcatacttaaataagtagtaaccttctcttcgtctactaagtgactatttatatgtaaataggaacccattgtcattgcgggtaatgttttatgtgcagaatgaactacaatatctgcaccatatgttaatgctgactttgggaatggttctcccaagcacagatgtgccccatgtgcctcatctaccaaaacagggattttatgtgcatgtgcaaaagcgatgcttgcctctagatccatacccataccataataattaggatgcgttaaaatgagtgctttcgcatttggatacttttcaattgctttcttaataatttcgttacgaactcccaccggtacgttataagcttcatcaatccatggatctaaaaaaatgggatttgctcccgcaagttttaaagcattaataattgatttatggcaatttctttgtacaagaacaatatcatgttccccacaacaagacaaaatcattgctaagttcccgactgttgaaccattaattaaaaaatagctcctctttgtattataaacttcagccaataattgttgtgcctcatctatacattcaaacggactatgcaaatcatctagtcctgctaactcagttacatcaatagatagaatatctttaaactctcttattgcctcctgagggaagtttaaaccattcttatgacctggaacatgaaaggataacggccctctttctttaaactctattaacgcctcatataaaggcatacgattttgattcatctacatctcttccttattattcattctctatctattatacagaacaaaaaaaataataggcatatgcctatttaaaaatatgatacttctaattttcgaagctgctttaaataatgtatatatttcggatcatctgtctctgtattcaccatatccttttcacattcatagcatattaaattattataaacatatataccttcttttctttttgtctcacaaacaatacaaacttcactttgtaatttcatagccttccctccctattttagtgaacctattttatacttctaatccttaacaatttacagaaaaatatacacccatctcttatataatatgattaactcttgggcaacgtgtttgtatcacccttacttctttcccgttctttttaacaatacaaaaaaacacaaatcaaatgacttgtgtttttagttgcttggcgacgtcctactctcacagggacaaggtcccaactaccatcggcgctagagagcttaacttccgtgttcggtatgggaacgggtgtgacctctctgccatcatcaccaaactatgaaggcatattccttcaaaactagataacattgctacatattatatggttaagtcctcgatctattagtattcgtcagctccacatgtcacgccttggctttcgctttttcttcttccgttacttcttctattccttctcttttctgcttcgctaacgccgccacttttgcttttgcagccgctgctgccttcgccttggctttcgctttttcttcttccgttacttcttctattccttctcttttctgcttcgctaacgtcgccgcttttgcttttgcagctgctgctgccttcgccttggctttcgctttttcttcttccgtcacttcttcggttccttctcttttctgcttcgctaacgctgccgcttttgcttttgcagccgctgctgccttcgccttggcttttgctttttcttcttccgttacttcttcggttccttctcttttctgcttcgctaacgccgtcacttttgcttttgcagccgctgctgcacgtcgttttgcttcttctatagtaatatcatcgttttttggtagcgctttctctttttcttgatcttcttcctcaagctcacttatttccgcctcgtgtttcgctacaaggcgttttctcgcttcttcttttgcacgcctagctgcttcttttttcagctcctctaaatctttatttggattgctcatttattcgtcacctgcttcccggtctttgcttcgtaacgaattttttcttttaatttattgattccataaattaaagcagctggatttgggggacaaccaggaatatacacatcaactggtacaatttggtctacacctttcacaacagcatatgaatttacatacggaccacctgctgtcgcacaagatcccatcgcaataacccatttcggttcgggcatttgatcatataagcgccgaacaataggagccatcttcttcgttaccgttcccgatacaatcatgacgtccgattgccttggtgaagtccgaaaaaatgacccaaatcgatctaaatcataatgtgatgaacctactcccatcatttcaattgcacagcacgccagtccgaatgtcatcggccataaagaattgctcctcgcccatcctttcaactgttccaatgtagaaaaaaagatatttcgttctaattctgctcgctcatttggatgtaattcctcaaaatttataaccattgtaacaccttctttttccaagcatacgctaatccaactagcaacattacaacaaagatgagcatttcaattaatgcaaataaacctagcttgtcatacgcaacagcccaaggatataaaaataaagtttctacatcaaagatcacaaacaataaagcgaaaatataataacgagcatgaaaccgaatatttgcatcatgaaaaggctcaattccactctcatacgtcgtcgcctttgctgcacttggtttatttgggcgcagcatccttcctaatgtaagagccactaccggcagcaatatacctaatagcaagaaaatcaaaacgatcatataactattttcatatacacttgccattgtgaaaccctcccccctaaattaagaacaagttcacatagtaaacaatatgtcctagttgcagtaattattatttttaaatttttctaaataatgcaactattctaatcattatagcaaaattcaaattcctatgtcgatatgttgggaggcagaaacaagaattattaaaatctatctttacaacttgctataattgtgcaaaataaatataaaacttatatatgcttttcaagaaaccgtaggtgatataaatgaaaaaacaaacacatgtaagtattcttataagcattgtattgctgtctataacgcttcactatgtagcgatgccttttctatatgaatactcattttcttttcagctattaatcggaatgagtaccctattaattgatattatcgcttgtagttatttactttatttttcaaacatgaaagaagggctatctcgtttattttggatcatattatctgttggagctctctcttattttatcggtgatatagtcgttgcctatcagcgtttaattgtaaaggacttctatacgttcgttgatccatctgactttttttacttactttttttagttagctttacgtttgcctttctatacgaaatcatttataaccgagatttattagaaaaactttttatgctatgtgatatttgtattatcgttacagcccaatttactttaagttactacttacttattgaacgaactattcatatctttacaacatcctatatcgacatatttgttcaacttacctatccaatggctgatttactctttctcttaataggaatcaaccttttattcaaaccactatccttattacctaaaaaggtcggtgcacttcttggcagtgctttaattttatatgctactacagatgcgatttatgcgtatataaaatacttcataccagagtattctatgtttacagttactcctttctatcaagtaaccttagtactagtagcaatcgcctgtattctccatacaaaaaagcctgaaaaacaagaacaagtactactaacacctaaaattggtgaatcaatccgattatcattaccgtatatttcggtagtaatgcttattgttttcatattagttgaatacgtttttgcgcctattatagtaatcggacttataataactttctctttcgttctcatacgtcatagtttagttcgaaaacaaaataaaatcttattgctagctcaaatgcaattcaactcagaactcgagaaacaaattaaactacgtacagaagatttagtagaacagaaaaatgaactctatcattctatcataatcaacaaatgtttaaatctttatacgagcatcatccagatccaatcttcacattagatttgtacggtaattttctcaaagtaaataacgctggtactactttactcggttatcaaacgaatgaattattaaaccagccttactattcactcatatacgaagaagatttagaagaaatgattaacgcctttcatcgcgtgaaaaaggggtattctatctctttagaaatacgggcgtaccataaaaacagagatatttactacttgcacgttaccgccgtaccgatctttttaaaggagaaaatttctggggtttatttaatgattaaagatattacagaaagcaagcaacaacaagaacaaattaatttcctagcataccatgacactttaacagagcttgcaaatcgacgtgcatttcatcaacatttagaacaggcaattgcgcgagcaaaaatatcgaaaaagccttttgctgttatgtttctcgacctagaccgttttaaagttattaatgataccctcggtcatcgagtaggagacctgttgctcatcgcagtagcaaaaaggctcgaaagaatagcaacatcaaatatgaaactcgcgcggctagctggggatgagttcacaatccttatcgagaattacaaaaaaaagccagatgtccaaaaaatagctgataggattgtagcggccatgaatgagccatttgaaatcgaaaatcaacatttacaaatctcaccgagcatcggaattgcaatatatcctgaagcaggtgaagatgcgctatccattttgcagcatgctgatatggccatgtacgaagcaaagaataaaggaaaaaacggtagctctctttacacgaaagaactatataaaaaaatggaacgaaaagctcgaattgaaaaagatttgcccatcgctttagtaaacaaagaattttatctcgtttaccaaccacaaattgatacgacaacaaataaaattatcggtgctgaagctttaatacgttggaaacacccactattaggtgacatttcaccatgtgagtttattccaattgtagaagagacgccacaagtagtcccacttggacattgggtattacaagaagcttgtctccaattaaaaatatggcatacctttggctaccaaaatttaaaaataagtgttaatctatccgcaaaagagttccggcaagatcaattaattgaaagcatttcacaaatattaaacgacgtgcaagtcgatccaaaatatgtaacccttgagttaacagaaaggattgcaatgattgacgagaaagaaacgttattaagactgaagcaattaaaagaatacggtatccaaacttccattgatgacttcggtactgggtattcttctcttgcttatttatcaatttttccaatcgacacattaaaagtaccgagagaatttacacaattagctgatcatcgtcctgaagaacgagccatcgtttctacaatactttccctcgcaaatactttaaatctttcagtcgttgccgaaggaattgaaaccgaaaaacagcttaagtttctgcaaaaacataactgtaaatatatgcaaggttactatttcagtaaaccacttactagtaatcagtttataaaatttctacaaaaaacccccagtatgaacaaataattcatactggggattttataatgctaaatatttttctcataatattcttctgcgatctcttcgtaaaaagctgcagatgtcgtatagaaatatggaattaaccacaggaatccaattcctaatgtaatacaacttaatataaaccagccaataaaacttaaacataaaatgaaatactccatcttatgtccatccatcatacgacgactttctgtaatagcttggttcagtgaatactcaggatgatcgtttataataaagtatgtcatcgcataagaaaaagatttaataatacctggaataatgaacaataacgtccataagaaaagataaagatttactaataaatataataaaaatgattttagaaatctctttccctctgaaaaccaaatgaatatattaccaatactagcttgcttttcacgaaggatatttaaaccaaggtaatatccacctaaagttaacggtccagtaacaaaaaatgtaagaatattcgttgaaagtgaaccatttgttttttgccaaccgaaaattaaagaaaatccccaatcaacactaaaactaaaagccgtgataagaattgaaatgagtagtgtagctccaacagctaatccccatttcccttctaatgaatctagtgcttctccttttaaatcactaatcatgcgtagcctcgcctcctatacacaataattctattagtatagcatgttactattgaaattcaccttttgaaatatagcgataaaagtgtgctgtcgtcgtactcatatacggactaagccaaagaaatcctattccaaaagtaagaagcgctaaaatagcccatcctatgaagctcagccataaaagaaacaaatctaacttatgacccttcataagattcttactttccttcatcgcctgcgaaacactatattctggattttcaatcatcacatagtacgtcagtgcataagaaaaatacatcacaatcataccaacaattgaaatttctagtagtacacagatagcaatagcaaacgacgcatttccttcttcaccaaaaaatgcaaataaggctactaacaatatcggaatccatgtacctgtatataataaaattgcaagcattgcccacattgttttcatcattcttttaaagccacgaaatccttcaaataagtaatctactttagcatcttctcgtatactgatctgtaaaaatacatttgtataaccgtatgatgtaatcccatacgatgcgctactcaaaattatcataatgcaataaaaaatcccgaatgtaacacttgctccatttgatattgtttgcccttcaagtgaacctgctagaccagcaaataagagaaatataataattcctggaattaatagtataagcattgcagccatcgaaacgacataacttaaaataaaatataaaattgttgatccaacacctagtccccattttccctttaaagagtacaatgcttctcgcttcatttcaccaatcattgattcatcccctttatgaaatataaattgttgtacacttctacttatacaagcatcaatataattataccagttttgtaaaattatccataaaatacacaaaaaaaaaatccgtaaaggcaaagcccttacggattttttcacttcatatcggaaacgtttaaacggttcacggcacgttgtaatgccatttctgcacgtttaaagtcaacatgtgcttgtttatcttgcagacgttgctcagcgcgacgcttcgcttcatttgcgcgatggatatcgatatggtttgcttcttcagcagatgatgataatacagtcactttatctggacgaacttcgataaagccaccgcttactgctacataatcagtgtgtccaccatttttcagacgaactgcactaatttttaatggtgcaacagttggaatgtgacctggtaagatccccatttccccactctctgcttttacacttaccatttctacttctttttcgtaaaccggtccatcaggagttacaatactgactggaaatgtcttcatacttcgtccctcctaaggccttacgccatcattttcttcgcgttttcaataacttcttcaatgccacctactaagcggaatgcatcttctggaaggtcatcatattttccttctagaatttctttgaaaccactaactgtattctttacaggtacgtaagaacctttttgacctgtaaactgctcagctacgtggaagttttgagataagaagaattgaatacgacgagcacgatgtacaactaacttatcttcttcagataactcatccatacctaagatagcgatgatatcttgaagctctttataacgttgtaaagtttgctgtacttgacgagctacttcataatgttcttctcctacgatttctggagaaagtgcacgagatgtagatgctaatggatctacggctgggtaaatacccatttgcgttaaacgacgctctaagtttgttgttgcatctaagtgagcgaacgttgtagctggtgctgggtcagtatagtcatcggctggtacatataccgcttggatagacgtgatagaccctttatttgtagatgtaatacgctcttgtaattgacccatttctgttgcaagtgttggttggtaacctaccgcagatggcatacgaccaagaagggcagatacttcagaacccgcttgcgtgaaacggaagatgttatcgatgaacagaagtacgtcttgtccttgctcatcacggaaatgctcagccattgttaaacctgttaatgcaacacgttgacgtgctccaggtggctcgttcatttgtccgaataccatcgcagttttcttgattacgccagaatcgctcatttcgtggtataagtcattaccctcacgagtacgctcacctacaccagcgaatacagagataccaccgtgctcttgtgcgatgttgttaattaattcctgaattaatactgttttacctacgccggcaccaccgaataggccgatcttaccacccttaatgtaaggagcaagtaagtctactactttaataccagtttcaagaatttctactttagtagataattcttcgaatgcaggtgcttgacggtgaattggatcacgatgtacatctgcaggaacctcaccatctaagtcaattgcatcacctaatacgttaaatacgcgaccaagtgttacatcaccaactggtacagagattggtttaccagtatcttctacttctgtgccacgaacaagtccatctgtggaagacatcgcaactgtacgaactgtatcatcacctaaatgaagtgcaacttcaaatgttaagttaatacttccgttttcgttgctttgttttaccgtaagggcgttgtagatttctggtagctttccgccatcaaacttaacgtctacaaccggacccatgatttgcgtaacgcgccctttattcatcgggttccctcctagctttcttttaattagccaactttctacgagcagctagcttttaattttttattggtttatagcttacgcgactcttttgacagagccgcttccgctttttattgaatctagctccagcggttagaatgttcggtggcttcgctttttcctacgaggcacaaatcgcctctacgtcaaaagctccatccccctctcattctgaacgaaccgcttccgccttttaatactattctaacgctgctgctccaccaacgatttccgtaatttcttgcgtaatcgctgcctgacgcgcacggttgaatgaaagtgtaagtgaatcgataacttccattgcgttgtctgtagcactcttcattgctgtcatacgcgctgcgtgttcacttgctttaccgtctagtaatgcaccgtacactaagctttctgcgtattgtggcaatagtacttttaaaatttcttcttcagaaggttcgaattcataagctgtcgtcggtttgtcagacgccacatcagtaagcggtaaaattttattttccgttacctcttgtgaaattttacttacgtaatggttgtagtagatgtacagctcatcataagcaccatctgcgaacatcgcaattgctcgagaagcaaggtctttaatatcagtaaatgatgggtggtcagataatccaactacttcatcaataatgttaaagccgcgacgttttaaataatcacgtcctagtcgtccaagcacaataatagaatattggtttgaatccatattatgacgttcacgaattacgttacttactgtacgtaatacgttactgttataaccacctgctagtccgcgatcagacgtaataacgatgtatcctgtacgctttacaggacgcgcatttagcattggatgattaatccctttgcttccttgcgcaatgctcgctactacttcttgaatcttttccatatacggaacgaaagatttagcattttgctctgcacggtttaacttagatgcagataccatctccatcgctttcgtaatttgactcgttttctttgtcgagttaatcttcgcttttatatcgcgtaaagatgccacaggttttcaccaccttttttccggaagttggcacgattagtaagaatcctcttcctaatctacgttgcaagatattcttgctcatgattgaaggaaaagaataggtgcacctactcttttcctttacatgacctttagcaatctcagagcccgagatgccttttatatatactatctagctccagcggcttgaatgctcggtggcttcacttcttcctacgaggcaaacaccgcctcttcgtcagaagctccatccccctcacattcagaacgagccgcttccgcttttattattcagaagctacaaatacttttttaaatccattgattgctgctgcaaatttgtcgtcatccgcaagtttcttagttgtgcggatttcttctaataagtcagtcgcattagaatctaaccaagcatggaattcttcttcaaaacgagtgatatctactactgggatatcatctaggaatccacgtgttaaagcgtaaagaatgataacttgtttctctacacgtaatggtttgtgtaatccttgttttaatacctcaacagtacgagcaccacggtttaatttcgcttgagttgctttatcaaggtcagaaccgaactgagcgaacgcttctaactcacggtaagatgcaaggtcaagacgaagtgtacctgatactttactcattgctttaatctgagcagatccacctacacgagatacagaagtacccgcatcgatcgctggacgtacgccagagaagaataggtcagattgtaagaagatttgtccatccgtaatagaaattacgtttgttgggatgtatgctgatacgtcccctgcttgtgtttcgatgaaaggtagtgcagttaaagaaccgccgccttttgcatcacttaattttgctgcacgctctaataagcgagaatgtaagtagaatacatcccctgggtaagcttcacgacctggaggacgacgtaatagtaatgacagctcacggtaagccgctgcttgttttgataagtcatcatatactactaatacgtgtttaccattgtacatgaactcttcacccattgttacaccagcgtaaggagctaggtataataatggagctggttgagaagcagatgcagttacaacgattgtgtactctaatgcaccgtgcttacgtagtgtttctactacgttacgtacagttgattctttttgtccaattgctacatagatacaaatcatatcttcatctttttggttaatgattgtatcaagtgcaaccgctgttttaccagtttgacggtcaccgatgattaactcacgttgaccacggccaattggtacaagagcatcgatcgctttaatacctgtttgaagtggctcatgaacagatttacgatccattacacctggtgctggactttcgattggacgagtgtttgttgtattgattgggcctaaaccatcaactggttgacctaatgggtttacaacacgaccaattagttcttttcctaccggtacttgcatgatgcgaccagtacgacgaacttcgtcaccttcacgaatttctgtgtaaggtcctaaaatgataatacctacgttgttttcctctaagttttgtgctagtcccataacgccgttagagaactctacaagttcaccagccattacgttatcaagaccatgagcacgcgcgataccgtcaccaacttggataactgtaccaacatcactaacttcgatttcagactgatagttctcgatttgttgctttatcagtgcgctaatttcttcagctctgatgctcatgtgcttcacccctatctattcttcattaattcacgctgaatacgtgctaattttccttgtaaacttccgtcataaatgcgatttccaatacgtactttaattccgcctagtaaatcttcatctacaacatttttcacgcgaattgcatcttttcccgttctctttgcaaatgcttcagcaatgttaagcttctcttcttctgatagaagacgagtagaatatacagttgcatccgctacgttacgttcttcattagcaagaacaacatattcatctgcaatttcaggtaagatatcaatgcgtttgttatcaattaaaatatataacgtatttaaaatagattcagaaacagatccgaatacgtttgcaagaaacgttttcttttgttcctttgaaatgttcggttgcgttaaaaagctatgtagttctccgttctttacataaacgttttgtacaaggcgtaattcctcttcaaacatttctaatacgtgtttttctttagcaattttaaaaagagcgacagcataacgttttgctacaatcccattgctcatcgcgcttctcctacttctttaatataatcgcgaattaacttcacttgatcttcttcttttaattctttttcaattactttagaagcaatttgaacagataaagaagcaacttgttcttgtaaagcagcaattgcttgctctttttcgcgttgaatttcttgtacagcagatgctttaattgattctgcttcttctttcgcagcagcaacaataacatctttttgatctacagcttgctttttcgctctttcgattaactcttgtgcttcaacacgtgattgttttaacatttcacgttgttcttctactaacttcttcgcctcagcattacttctttctgcagcgtcgatttcattagtaacatgctcttcacgttctttcataattcccattaaaggaccccacgcaaatttgcgtagcattactaatagaagtaagaaaatgaacaatgtataagcaatcgttccaaatggaatggcagcacctaataataaagttggcacaaggattcactcccttcaaaatatctaaattgatcatatgaaaaaaaaagacatacgtttcattcataaagcaatggcgaagaaagttcggaaaaacactcttcgccatctatgtaaggggagtctcccttatttgttcattacgatgaatgcaataactacaccgatgattggaagtgcctcaactaaagcaaccccgatgaacataattgtttgaagtgcgccttttaattctggttgacgagcaacaccttcgattgtacgtgatacgataagaccgttaccaatacctgcacctaatgctgataaaccaattgcaattgcagctgcgattacacctaaactcatttaatttgtcctcctttgtattataaaaaaataaattttttcttacttaaattatattaatggtcatggcttactttatgagccatataaaccatcgttaacataacgaaaataaatgcctggattgaaccaacgaatacactgaatcccatccatgctaacattggtacaagcgcacctaatgccccaaggactgatgctccgcccaacttagcaagtaatcctaataagatctcacctgcataaatgttaccaaataaacgaagacctaacgttaatgtgttagcaaactcctcaataacctttaatgggaataagaatttcataggttggaaataaccttttacgtactctttcgtacccttcatcttaattccataataatgggtgagggtaactaccatcacggctaatgttaatgtaactgctggatcagacgttggtgatctccaccatgcaatatgttcgccagcttcagttgctgaatacatgaatggtaaaccaaggaagttcgatacgatgataaacatgataagcgtaacgccaagcgttaagaaacgtccacctgttttccagtccatcgtactattgataatccctttcacgaagtcaaacacccattccatgaagttttgcatcccggttgggcgaagagctaagctgcgagttccgataacagcgattaagaaaacaataactgctgctacagtaaccatcataactgatgacaaatcgaacgttaaacctagaaattcaactaatttaccgtgttccactagtaattcacctctcttccctgctcttatactctaaataaagaaaatctatgatcatgacaaggtatcctgtcagcaatcctacacctaggccccacatcgcgattaactcttgatatttggctgcaaataaaattaataacccaatcgtggcgaatcttgaatatgtacttaccgctgttgccttgaacttcacgttttctccatttgttacgcgatctagcagcttgtctgttctacgtgcaatgatgcgcaaactaagaaaactgaaaatcgtcccgataatcagtccaagaaatacatccttgtaagaggtaaatccccatcctagcactagaagcgcaagcaagtagtacatatatttcttttgtctttggacaagtccatgtacgtctatcatcattgctctcccgaatagtaatgtcgaatgagtcgaatcattgcgtatacccctgttcctagtccgagtaataaccctataataagaaacaacggaaacgttccaaccttattatcaatccactgcccaccaaagattccaacaagaatagaaccgactaattgagcaagaatacctgacattaaagcataagcttttatatggctgcgatcgtttttttgcaaagattcatccctccaatatgtaaccctcattcacgatgtgttaataataactcatttttttgcataaatcctatacaaaacaaaaagtttacattttcgtcacggaatagatgtaattttgtcactgaaagccctaccatctatccccgttgttagcatacaatagggtattaacagtgtcaacgagaaatcgtaaaaaatctaaaaatttgagtattaggcatttcctcccaaaaatgaaaacgttccccttctaaatactggttacatatatgcaatttctaacagttttctctttataatagaaggaaatgttcacaagtttgtcactattatattttcgagatataacgcttttcttccataatatagtgttcctcagacgtaagacttctatattatatgtgaggtgtatgcaacttatgttgtatatacgatgtatatttatcctctccccctcccctacttgcttacaacaaaaaagacgagctgggaaatctcccctgctcgtcagttgtcttacttcgttccgaataaacggtcaccagcatcaccaagacctggtactacatatccgtggtcatttaatttctcatctaatgctgctacataaatatcaacatcaggatgttcttcttgtactacttttaccccttctggagctgcaacgatacacattaatttaatttgtttcgcaccgcgctttttcagagagttaattgcttcagccgcagaaccacctgttgctagcatcggatctagtacgataaagtcacgctcttctacatccgttggaagtttcacatagtattctaccggttgcaatgttttagggtcacggtataaaccaacgtgtcctacttttgctgctggaattaatttcagaattccatcaaccattcctaaacctgcacgtaaaatcggaattaaaccaagttttttaccagcgatcacttttgttgtcgctttgcttacaggtgtttcaatttcaatgtccttaagtggaaggtcgcgagtaatttcgaaagccattaaacttgctacttcgtccactaattcacgaaaatctttcgtacctgtattcttatcgcgaatatatgtaatcttatgttgaattaacgggtgatcaaatacatacagttttcccatgtgaatctctcctttagatgatattcatgcgtttgcacgcttttttacactatttacgattgtaaagaaaacgctactaatattcaagggcaaatttggcaaaatcatgattttacgatgaatctatctagtatctttaccaattatgggagctgtatccttcattatatcgccaaaatttattcatcatttgtatacatactttaaaaataatatatgtccacaaaaaagaccgccaaaacaattaagtctcggcagtcttcttcaatctattatagatttggatacattgtgaatttgctagttaacgcttctacacgcttacgtacttcttctaatgcagcttcattttcatgattttttaatgtataagcaataagtgacgcaatttcatccatttcttctaaaccgaaaccacgagatgttacagctgctgtaccgatacgtacaccacttgttacaaatgggcttgctgtttcaaatggaattgtatttttgttcactgtaataccaacttcatctaatacgtgctctgctactttacctgtgatttctaagttacgaacatcaatcaagattaagtgattgtctgttccgccagaaacaagtgtaagtccttctttttgaagaccttcagctaagcggttcgcattgttaatgatattttgtgcatatgttttgaaatcatcttgaagtgcttcaccaaatgcaacagcttttgcagcgattacgtgcataagtggaccaccttgaataccagggaagattgatttatcaatttgttttgcaaattgctcttcacataaaatcataccaccacgcggaccacgtaacgttttatgtgttgtcgttgtaacgaaatgtgcatgtggtactggatttgggtgtaaaccagcagctactaaaccagcgatatgtgccatatcaaccattaaataagcgcccacttcatctgcaatctcacggaatcgcttgaaatcgataacacgagggtatgcacttgcacctgcaacgattaattttggtttatgttctttcgcttttgctaatacatcatcgtaattaatacggtgagagtcagcatccacgccatattctacgaaattatattgtactccactgaagttaacagggcttccgtgtgttaagtgaccaccatgagataagttcataccaagtactgtatcgccttgctctaaaatcgtaaagtatactgccatgttcgcttgtgcaccagagtgtggttgaacatttacgtgctctgcgccgaaaatttctttcacgcgatcacgtgcgatatcttctactacgtctacgtgttcacagccaccatagtaacgttttccaggatatccttcagcatacttattcgttaaaacagaaccttgtgcctccattactgcttcacttacgaagttttccgaagcaattaactcaatctttgaacgctgtcttcctagttctgcctcaattgcagcaaataccttttcatcttgacgttttaaatgatccaccaaaatcccccttttctgaacgaattacatcgattcccaacagttttttcttatttattcagaaaaaacgaaaattcaggttgtaattctttcgaaccttcatgttttcaactacattctaacatgactttctatatcataaaagaaaaaaaagaccgaaaatcggtcttttctttcttctattataaagtcagacaacataccttttatcttatgataaacagttactatatgacttcctaatttctcatatttaacggcaagtggtagtctcttccactgccgcatagacagcacgcgctccaccaattagttttccacgtgttttggccatcgttacatgcgcacttccaattgccttcacacttgtacgaaccggaacagctacatgctttaaatgcataccgataaatgtatcaccaatatccattcctgcatcagctttaataaactcaactactaccggatctttcaaattgtgatacgcgtatgtccccaatgcaccacctgctgatctaacaggcgtaactgttacaatttcaaattgatattttatcgctacttctctctcaactactaaagcacggtttaaatgctcacaacattgaaacgctaattcaatacctgttcgctcttgaaattgttttaactcagagaaaatcgcctctgctacttccatcgttcctgatgttccaattctttcgcctagcacttcgctcgtgctacaacccactacaaaaatttgaccgctttgtaatgaagcttgttcttggaaatcagaaagcgacatttgtagctgttctcttacctttacgatttctgtcattacgcctcttcctttcacaggttggttcaccaaattatatttcacactactgatagttagaatctattactttgtttcgtatgttttaatttttcctacgcggttttcgtgacgaccaccttcatagtcagttgttaaccagattttcgcgatatcacgcgctagaccagcaccaattacacgctcgcccatcgctagcatgttagtgtcattatgctctctcgttgctttcgcgctgaaagtatcatgaactaacgcacaacggataccatttactttgtttgctgcgattgacataccaatgcctgtcccacaaactaaaataccacgatctacttcaccattcgctaccatttcagctgctggaaacgcaaagtcagggtaatcaacagaaccagcttcacattcacaacctaaatcaacatattcaatatttaactcttctaataaacttacaagttctttgcggatattcataccgccgtgatcagatgctattactactttcatttttacccctccaaagtttcaatcaattatcttcatttcacactcgctacctcatataggaagaagtgatctccaatatcgtattatacacgaaacatcaacctactgaatgttttttcagtaaagtttgtacaagtttttccatctcatctaacgtttctttataaatagaaagcgagcctccaaatggatctgaaatgtccttgcctataccttcagttaatccatataacgtatttaatttcttttcaacgctcggataatgcccaagtacaatttgtttatggttttctgtcatcgttacaacaatatcagcccaatcaagcaaagtttcatttacttgctgcgccgcatgatcaattaaaattcctttttcagctaaagcttccttcgcatgtaccgatgcatcgctcccaggataggcgaaaacaccagcagattgcacttcaaacttatctcctccgtgatgacgaagcaacgcctcagccattggactacgacatgtattgccagtacaaacaaataacactcgtttcattcaaacccacccctatattcgatttcttaccattcatcataacttacattagaatagaacaaaagaaatgtgaatatacaaaaggcgcatttctcttatattttttctaagaaaaatgagccttatccacatatatgtgaaaccctatttccaagtgcctagagtattttaacatacatgctgaacatgcaacaaaaataaggaatccatttcatacgaaacggattcctcttatattgcaattatttcattgtaactttcattacttctgttgaaccttttgtagctgctacgcctacagttgtcttaatagactcagctgcatctgtgtttgtaataacaattggagtaattgtgcttttcgctttttcacggattaattctaagtcgaatgagattaatttatctccagcttttacagcttggccttcagaaacgtgagcttcgaaaccttcgccttccatttttacagtttctaatccaacgtggattaaaatttctgtaccgtttttcgctttaattccgatagcatgttttgtgtggaataattgtacgatttcaccatcaactggagatacaactacaccttcagtaggatcgattgcaacaccgtcacccatcatacgaccagcaaatactggatctggtacttcttcaatatttttcactgctccagttaatggagctacgattgtttcttcatttgtttttgaaccaagaccgaataattttttaaacataggatagtcctccttataatttacctaaaagtttatagggcaatccctagtaaagctcgggatacatgtaagacttcatacttcgaatattatactgtaaaaacgctttcgaaataaattacgtcattactaatagactcttattgtagcgcttcacaaaattccagtcaattctgattgtctgaataacaattagaagttaacttctatttatattttctctttttttgcccaacttgtctagaggtctttactacattttattttttgttgttaatttgtaaaatttaattcaaacttttttcgaaattcacttgactaaagtaagtaactattttattattacttacgtaaggtaagttaataacttttaggaggtttttaaaaatgatggatttcggtctacttattattcgtcttattataggaattacattcatgggtcatggcgctcaaaaattatttggttggttcggcggttacggtttaaaaggaacaggtggctggatggagtcaatcggtttacgtcctggtgtatttatggcatttatggctggcgcaactgaattactaggtggtttcttatttgcatcaggtattttcattgtagttggttcattatttatcgttggaacaatgttaatggctatcttcactgttcacggaaaaaatggttactgggtaacacaaaacggatatgaatataacttaatgttaatcgctgtcgctgttggtgtagctttaatcggacctggcgcatacgttttactttaatttttatctcaaatttgagattcttgaaaaaagaacttacttcattacaattgaagtaagttctttttatgaaacaaaatattatttccagcaggattttctcatcgttatcttgtaaacaaacaataagtattcatatttagaaaggggattacaagcatgttatccattaatccaaatgaacaaactgaaaaagataattacaaattacttactggaagtatcatccctcgtcctgtcgcattcgttacttctgtaacaaaagaaggcgtactaaacggagcaccatatagttatttcaatattgtcgctgctaatccaccacttatctcagtatctgtacaacgaaaagccggagaaagaaaggacacttcccgaaacgcaattgaaaaaggagaatttgtcgtacatatttctgacgaatcatatgtagcagcaattaacgaaacagcagctaacctcccgccaaatgaaagtgaaattgaactagcaaaattaacaccaatcgaaagtgaagtcatctctgttccaggtgtaaaagaagcaaatattcgaatggaatgcgtattagaacgtgcaattccacttggcggaacggaagactcaccagcttgtgatctactaattggacgcgtcgttcgtttccacgttgccgaacatctatatgaaaaagggcgcattcacgccgaaggactcaaaccaataagccgcctagcaggacacaactatgcaaaattaggagaacaatttgaattggttaggccaatctaaaagcggaagcggctcgctcagaatcgcagggcacttcaagctctcgaccttgaagcgctttttgcttcatgcgagagagcgaaatgaccggagattctagccgctgaagctggataatatttaaaagtggaagtggcccgtttagctctgaccagctaaggttctctcgcacaaaaggtgctttttacctttcgtgcgggaggttcttagatgcgaagagctggccactggaactggataatatctaaaagcggaagcggctcgttcagaatcgcaggacacttcaagctctcgaccttgaagcgctttttgcttcatgcgaagagcttgccgctggagctggatatatttaaaagcaaggcggctagattcctcccatcactcaaatataaaatcccctgctttttagcaggggattttctcattgtaattcttccttcttttcctctaaagtaggcattttctcttttttcggcttccctagcttaattacgaagaagtatagggaaagcaatgtaataagaaaaacaattaaaaacgggtacggagagtaaaaggcacgcgccgcctcagtctttcccgcaacaaatttcaatgactcaatatctaaaaactcagcaaacatttgtacaccgagcatactaaaccaaaaaacaaaaaaactaataataataccaaaaacttgcttcaatctcgtcattcatctcatcctttctatatctgtaatttttagcgcaataaatatagtacaaacaaaatattcacagaaaggaactatctcaccattcacgaattaacttaatccaacctaacatcgaaatttgcaaaataataccccaaattataagtcttcttagccatcgaggatagaaggtcaaaaatttaacataccattccaatagcttgttcataattccctcctacataaaattatataggaaaaaggatatataatccaaacccaaccaaaatgataccacctactatctcaccatatgtaccgagcatatctttcgcatgtctcccaattaataaacccatccacgctaataacatgctaacaaatccaaaaagtaaaatcgtaataattgtttgtgccccataaataccaagactaagtcctactgagaaactatctatactgacgccaaatgcaaatacgaataaactaattccaataggggctgttctagtctcttcattttgtaaaatgctcgaatatacgatataaaaccctagtccgattaataaaatagcacccgcaaaatgtgcgatatctccatacttctctgataaaaaacgacctagtaccattcctataaacggcataataatatgaaatatccctatcgtcataccaatatacaggatttgtcttaactttaggggtatcatccccataccaagactcaccgagaacgcatccatccctaaggcgaatgccataattattaaaggtattagctgttcaaacgtcattcatgcccctccttggacgtgctacttcacaatatgcttatccaaggagaaatattctgtttgctaatcttaccttatcattcaataataatatgatgtcctgccgcttttgttaaacgattcataattgcattccctattccttcattagggaatgactcactaaaaataacatccacttcacttgcatcaaatgttctaagtacatcatataatttagtcgcaacactagctaagtcacttctaacaccacaagataatataacatctgcactatatacatgctgatactcttctgtcgttaatacgcctactttaaatccttcttcctttttctcatccacaagatgctgaataaactcacgtgagccctcaacaatactaagtggtgctttcggggcataatgtgtgtatttcattccaggcgatttcggtttttccttctcatcctttaaagctggatctaaagaaacagtacctatcaccgcttctaattgttctttcgtaatcccacctggacgtaatattgttggaaccgcgcttgtacaatcaattacagttgattcaacgcctactccagttgcaccaccatcaacaatacctgcaatcttcccattcaaatcttcatatacgtgagaagctaatgttggacttggacgccctgaacgattcgcacttggtgccgcaacaggtacattcgcctcttcaataagagcaagtgcaattggatgatcaggcattcttactccaaccgtattaagtcctgccgtcaccttctctgaaatcccttcttttctcggcaaaataattgttaatggtcctggccaaaaatgcgccattaacttctctgcaactggtggaatttctttcacaatcccatctaactgagattttgtacctatatggacaatgagtggattatcactcggtcttcctttcgcttcgaaaattttcgcgattgcttcatcatccatcgcatttgcacctaacccatatactgtttccgtagggaaagcaaccgcctcattttctcttaataattttgctgcttcttgtaactgtggataatatttttttctttccacaacattatccacaacccacatgtttgtatgcatttttttccacgtccttttctacccttaaatacttgtatatttttagtttactatgagatttatccaaaagacaaacaaggtttatccacaaaatgtggataaacctaattaatccgtggataactttgtgaatagctgacaatttagtattattgcattctgctcttttatatttttacaaaaatgttctagttgttgaattccctctggaacctcatccttttctatagtaaaaaagtcaaaaaactgaaagatcggtacagattgtggatgatttgttagtaagtacaattgttgaacacttttttctttcatatactgcaaaaacatttcaaaaaaatataagaaagtctgtttatccacatgaggtgtgaataaacaagaacgaataagcacatcttccccacttcgttcataaccaattacagctcgtatttcttccgcctcttccaaaatcataaattgtgcgtacaactcatttattttatcatcttttttattagcttgtccgaaaaaagaatgtaatctttccacatctgctttcgtagcaaaatacactttcttcataataaatccctcctcatttttatatatgaagagggatttattaatagtactatttagagaataaagatgtaaaagcttctacaataaacaatttaacttctggcttttcttcttcctcttctacttttacatactcattttgcttttcttgttttttctccacaggtttctccacttttcccacagtttttatttcttctttacttacaggctgctcttcgacttttgtttcattttttactactttcttttcagaagctgttactttttttactacttcctgctttacagctttcgtttcttttaccttatctactttcttctcttctttatctattacttcctcatctagttgtttcacctgctcctcttcaggagattccgccttcacaacgtgctcttcttttcttacagctgtcccgctcgaaaaatctaagaaacacattggtggaaataatacacaccaccagttcgccccttcaccttctccaattgtgattaatactgcttcatattctcctgctggataaataaaattcccgtatacctttgtaggaaactttacattcttactaaatttcacttgaaatgaatctttacttccttctctttttaacgtattttccaccgttttctcgatttctggaatatgactttgaattactttgcgtgcctcttcaaatgaagttaaatccgctacccacccatcaatttgtgcttttacttcatcacgcactttacgctttaatgcctggtctttatctgaatcactatttgctaaaattcgtaatcgaacggcctctttcggaataactgaaggccctttcgcatcagctttcatatatccaaactgcacaagtaactgtgcaccaattaatagtataagaagataagcaataacttgttttttcatttcctccaccgtcccttctacaaacagtgtggacagactttcatctttctaaactattaaattcaaaatctatatgaatttttccacaaaaaaatagagtaaggtgtgaaccttactccatctctgcaaataccatacgatcttttccgttaatatcgaaaacaacctcaacatgagcatgtggaaaagcttgttgtaacaatctttttacatcctcaccttgtcctactccaatttcaaacgccacaatcgctttcttctgcaacacattcggcaattcttccataaaacggcgatagaaatctaatccgtcttcaccaccaacaagtgctctcttcggctcatgctctttcacaacaggagaaagaccacgccaatcctcttccggtatatatggaggatttgaaacaacaacatctagcttttgacccgttttatgaaatggtgacaataaatcaccgtgatagaacgttacttctgcacctaaagcttttgcattttcttttgcaacttcaatcgactcttgtgcaatatctactgtatacacatgaagattttcattttctaaagcaagcgtaatagaaatcgctccactacctgtacctatatctgctacatgtagtttctcatcaccaaaatggcgctcgattctttctaatactcccactataagctcttctgtttccggtcttggtattaatacttcttcattcacaaagaaagaccgtccataaaacatttcataaccaatcatatattgaataggaataccttctacatgcttgtggataaactccgtaaagcttttctcttgatcctcagttatttcttcacgcatattcataagtaatcctgttctgttcacctttaatacatgacaaaggacaatttctcccgcattttcatctcgtccattttcctgtaaaaaagaagaagcccatttcagggcttcatagacacgcattactcagctgcctccatcttttgagcctgatcttccatcactaaggcattgatgaaatcatctaacttaccttgtaagatttgatctagcttttgaatcgttaaaccgattcgatggtctgtaacacggttttgcgggaagttatacgtacgaatacgctctgaacgatctcccgtaccaacagcttgtttacggttttgatcatactcagcttgcgcttcttgtctaaacttatcataaacacgtgcgcgtaatactttcatcgctttttctttattcttgatctgtgatttctcatcctgacaagatacaactacaccagtcggtaaatgcgttaaacgcaccgctgacatcgttgtattaacgctctgtccaccaggtccactagaagcgaatgtatcaacacgaacatctttctcatgaatatcaatttctacttcttctgcctctggtaatacagctactgttgctgtagatgtatgaatacgtccaccagattccgtttcaggaacacgttgtacacggtgagcaccattctcgaatttcagcttcgcgaaagcacctttaccattaatcataaagataatctctttatatccacctaactctgtatagctagcctcaataatctccgttttccagccctgtacctcagcgtaacggctatacatacggtataagtcaccagcaaataaagctgcctcatctccaccagcagctccacgaacctcaacgataacgttcttatcatcattagggtcttttggaacaagtaaaattttcagacgctctgataatgttttatcttgtgattctaactcagaaacttcttcttttaccatttcacgcatttctgcgtctaacttatcttctaacattgctttcgcatcttttaattgctcacgaacatccttatactcacgatacacctctaccgtttcctgtatatcagactgttcctttgaatattcacgaagcttatttgaatcactaataatcgctggatcacttaacaattcatttaacttctcataacgattttctacagcttgcaaacgatctaacacatcattcacctctacatcctagtatctaatacaaatagtatatggtacttactcaaaaaaacgcaaattatatttaaaagtggcggtggctctttcagctctgaccagctaaggttctttcgacctaaaggtgctttttaccttttgggcggaaggttcttagatgcgaagagctagccaccagaactagatatatttaaaagcgtaagcggctcacaccgctcattctctctattttgaaaaaaacccgccttgcgcagcgagttttacttatctttgtttgcaggtactgcatgacaatgacgacaacgcggttcatacgtttctgaagctccaactaaaataattggatcatcaaatgccgctggttctccatcaattaatcgttgtgtacgacttgctggagatccacatacagaacatactgcttgtagttttgtcacatgttcagcaatcgccatcagctgaggaacttgtccaaatggtagaccacggaaatcttggtctaaaccagctacaatgacacgatagccacgatttgccaatacttgcaccacttccacaatgtccccatcaaaaaattgcacctcatcgattgcaataacatccagctcttctgtaatatgttcaaatatatcctttgaagctgaaacaggaactgcttttacctttaatccgttatgtgatactacatcttcttcactatatcgattatcaatacatggtttaaatacaattgcatgttgttttgcaaattgcgtacggcgcacacggcggattagctcttctgacttgccagaaaacatactaccgcaaatcacttcaatccagccattttgatttattaagtacatgaagctctcctttcatctacttttcagttaaaagtagggtaaaggtataatattttcgcaaaaaaaacagacaagcgaatacatacacttgcctgttttatgtttttattacttaagaccgtatttcttattgaagcggtcaacgcgtccgtctgcagtagcaaacttctgacgtccagtgtagaatgggtgagaatcagaactgatctcaacttttagtaatggataagtgttaccatcttcccactcaacagtttcgttagatcctttagtagatccgcttaagaatttgaagcctgtgtttgtgtccatgaatacaactttcttgtaatctgggtgaattcctgctttcattcttttcatctccttccgccctgaatcattttcgaaacagagtttttcatcttcagctgcatacacaactatattgatgaaacacatatgatgaaattataacaaggctaacttcattttgcaactacctgtttttgtctttttaattttaaaagcgcaagcggctcgttcagaatgggagggggatggagcttctgacgtagaggcgctttttgcctcgtaggaagacgcgaagccaccaaccattctagccgctggagctggatattaaatttaaagtggaggtggctcgctcagctctgaccagctaaggttctttcgacctaaaggtgctttttaccttttgggcggaaggttcttagatgcgaagagctagccaccggaactggatattatcttaaagtggagacggctcgttcaaaatcgcagggcattggagctctcgaccctgaagcgctttttgcttcatgcgagagagcaaaatgaccggagattttagccgctggagctcgatattatcttaaagtggagacggctcgtttagctctgactggctaaggttctctcacttatttctctctttaatatcacctaaacagcataaaaaactcgcttactataaaataagcgagtcctgattttttccctttacttagttgttacatacctttttgagtctgcaacaatgttttgtaaaaactcttcatttgtcttcgtttgacgaagcttacgtaagaaactttcaacgaagtctggtgtatcacgcattgttttacgaatgccccataacttgtctaaatgttcttttggaattaatagatcttctttacgtgtaccagaacgacgaatatcgatcgccgggaagatacgacgttcagctaatgaacgatctaagtgaagttccatatttccagttcctttaaattcctcgtaaataacatcgtccatacgtgatcctgtatcaacaagggctgtcgctaaaattgttaagctaccgccttcttcaatattacgcgcagctccaaagaaacgcttcggtctatggaaggcagctggatcgataccacctgataatgttctaccacttggtggaataacgaggttgtaagctcgagctaaacgggtaatactatccattaaaatgataacatctttcttgtgctctacaagacgcatcgcacgttctaacacaagctcagctactttaatatgattttctggcacttcatcaaaagtagaacttacaacatctcctttaacagaacgttcaatgtctgttacttcctctggacgctcatcaattaaaagtacaattaattctgcttccggatgatttgttgtaacactatgcgcgatttcttttaatagacttgttttaccagcctttggaggcgcaacaattaaaccacgttgtccaaatccaactggtgcgattaaatccatgatgcgtgtcggtaactttttaggttccgtttccaatttcatttggcgatctgggtataatggtgttaatgcagggaaatgcacacgctcttttgctgaatctggatcatctccgtttacagcttcaacttgtaataacccaaaatagcgttcattttctttcggaggtcgtactttaccagaaaccttatctccattacgtaaatcgaaacgacgaatttgcgaagctgagatataaatatcttctgagcttggagaatagttgataggacgtaggaatccaaatccttctgattgaataatttctaatacgccttccatgaaaaagaaaccttctttttctgctcgagctttcaaaatagaaaaaattaactcttttttcgttaatttgctataatacgaaatcttaaattctttcgcaagctcgtataactcttttaatttcatgttttctaatgctgcaattgacaaattcattcagacaccacactttaacgttattctcttttttcatgggtaaagggaaaaaatacggaaggcaaataattaataatgaaaggcaataagttcaagtagggtaatattcactattgtaacccttttatctagttttaatcaatacgttggaacacaaatacaagaagcgaagacaagaaaatttgtcttcgcttcttatttaatttagttccagctccgatagttagaaaagtcgaccattttaacctttctgaacgagctgcttacgctttttatttaataaccaagtttggttttttattcaagctatgacgtccatccacgaagcgaactgtgcctgattttgcgcgcataacaagggattgcgttgttcctacgctacctttaaattgaacaccgcgtaatagttctccatctgttacgcctgttgctgcaaagattgcatcgtcaccttttactaagtcctccatacgaaggatacgattaatgtcttctatgcccatttttttacaacgtgctaattcagcttcgttttgtggcaatagttttccgtgaatttctccacctaaacattttaaagcaactgctgctaatacaccttcaggtgctccaccagatccaaataaaatatctacacctgtacgatcaaacgctgtattaatcgctccagctacatctccatcattaattaatttaatgcgagcaccagctttacgaatttcttcgataatttcttgatgacgtggacgatttaaaactgtcgctacaacatcttcaatatctttattttttgctttcgcaactgcacgtaagttatcaataataggcgcatcaatgtcgaccgccccgactgcttctgggccaaccgcgattttatccatgtacatgtcaggggcatgtaacaaattaccgtggtctgcaattgcaataacagcaagagcattccagccaccagctgctacgatgtttgtcccttctaaaggatcaaccgcaacgtctacacgtggtccatatcctgtacctaatttctctccgatatatagcattggtgcttcatccatctcaccttcaccaattacaactgtacctttcatcggaattgtatcaaatacatcacgcatagctgatgttgctgcaccgtctgcctcgtcctttttcccgcgccccatccaacgcgctgatgataaagctgcagcctctgttacacgtactaactccatagataaacttctttccacgataatccctctcctttaagtctttatatttctgccctattttgtgaaccgtgtttttctataaagtgtacttccgcaagtagtgatgcttcgcttcccccttgcggaagtatcacttatgcgttcttcatttcttcaatttcttgctttgtcatttgttctcgccaaatgtttgctccaagccctttaagcttgtccactatattctcataacctcgatcaatatgctcaagtcctgttacttctgtaattccatctgccattaaacctgcaataacaagtgccgctcccgctcgtaaatcactcgccttcacttttgcaccttgcagtaacacaggaccagttacaattgccgaacgaccctctactttaatttgagcattcatacgacgtaattcatcaatgtgtttgaaacgggcaccgtaaattgtatctgttacaactcccgtcccgtgcgcctttgttaaaagcgtcgtaaacggctgttgtaaatccgttggaaaacctggatatacaagcgttttgatatcaactacttttaactttctattaccgttcaccgtaatttgatcatcgttcgtttcaacttgaacaccagcttctcttagctttgcagtaactgattctaaatgctgaggaataacgttatcaaccgttacttctcctcctgatgcagctcctagaatcatatacgtaccagcttcaatacgatctgggatgatagtatggtgacaaccatgtaaagagtcaacaccatctattcggattacatctgtaccagcacctttaatacgggctcccatgcttgttaacaatgtagctacatcaatgatctcaggctctttcgctgcattttcaataacagttctaccttttgctcgtacagctgctagcataatattaattgtagctcctacactaacaacatctaaataaatacgtgccccgcgtagctcatctgctcttaaatagatggcaccttgttcattcgtaacatgtgcacctagcgcttcaaaccctttaatatgctgatcaatcggcctcgggcctaaatgacatccacccggaagcccaataacagcttttttaaaacggccaagcattgcacccattaaataataagaagcgcgcaattttttcacttttccatttggcaaaggcattgcaaccatgttagaaggatcgactaccatttcttcctcctgtccataagttactttccctccaatttcctctagtaagtctcctaacattttcacgtccgaaatattagggacaccaccaatagttactggagtatctgctaaaattgtcgctggaattaatgcaacggcactgttctttgcaccacttactcgaattgttccatttaaagctcttccgccttcaattagcaatttttccatattgagctcccttcttgtgaatgtatttactttctatctttttatagaaagctccccttaagaatctcaattactctttccatcccaaaactcaataaataggaaaccattatcttcatttctcctgtagcacgaatagataaagatcaactattcatcgaattcactttatcaatttagatacgttatcacatttattaataggactatgcacattattttctatttaaaaaccaaaaatgataaaatctttagacttgttcacgctttcattatacaacgaaaggaaaccgtctaaaagactagacggtttccaaaacggaattttattcttacgctttaccgttagaaccgaattcgcgaattttaccaataacagttgctttgatagcgtcgcggccaggtccgataaatttacgaggatcgtaaacttcttggtctttgtttaatacttcacgaacagcttttgtaaactcgatttggttctcagtgtttacgttgatttttgaagtacctaaagagatagctttttcgatatcagcagttgggataccagtaccaccatgtaatactaaaggtacgccagtgaagtcacgaacttgttccatttcagcgaatcctaagttaggctcacctttgtaaggaccgtgtacagaacctaaagctggagctaggcaatcgatacctgttgcttcaacaaggtgcttacactctgctgggtcagcgtaaattacgccttcagcgattacgtcgtcttcttgtccgccaactgttccaagctcagcttcaacagatacgttacgagcgtgtgcgtattctactacttgtttagtagtttcaacgttttcttcgaatgggtggtgagaagcgtcgatcattacagatgtgaaacctgcatcgattgcttctttacatttttcgaagcttgaaccatgatcaaggtgaatcgctacaggaacagtgatgttcatttcttcgattaaagctttaaccatagctacaactgttttgaaaccagtcatatgacgagctgcaccctcagatacacctaggattacaggagatttttcttcttccgcagcagctaagatagcttgagtccactctaagttgttcatgttgaattgaccaactgcgtattttccttctagtgctttgtttagcatttctttcatagaaactaaaggcatggtgaatcctcctaaaaaacgttttttgtatccgataagttcttatcgctggtagtatgaccagaataaggtaaaatatgtatatctacataccggacttttttctacactcaataggataacaacttgtactcaaaaactcaaccgtattcacctgcacaatagtccatgtaaacgcttttttccatattttttataaaaaattcatttttacgcctctacagcgagctcatttctcacagcttgacgaatttcatcaatatcaaatggtttagcaaaatgcattaaagcacctaaatcttttgcttcttggatcatatcaagctctccataagcagtcattaaaattactttaatactctcatcaatttcttttacatgctttaaaatctctataccatccatgcctggaattttcatatctaacactactaaatctggattatcttttttcacgatatctaaagcttgaaatccatttgctgcttggaatgtctgataaccttctttttggaacacttcatgtaatagcacacgaatcccatattgatcatcaacgattaaaattttaccttccataattcccaacctttctgtgtaagtacaagatttaaagcttcttatatcttaacgatttattttcgctattctttggcaaattccttcctattctttcttattttaccgtttcctattttgttatgctaccctacgatttcacctttctaaaaaaataaactataatgaaagccggcaaacacgtacgaagggagtaacattatgttaaaaattttttcaactcaattaagtggttatttctccagagtttctcaaaaagaagaaatgaatatagaagatagtgctcgtttacttgctcaagcactagttggcgatggtttcatttatttacatggtacaaatgaaatggaaggcgttgttgccgaggcactattcggtgctgaaccaatgaagcaagcaaaacgcttatttgaaaatggtaaagaagcagaagtaacctctgcggatcgtgtacttcttattagccgtttttcaacagatgaagcggttgtagaaattgcaaaaaaactacaagaagagggacactctattgtcggcatttctgctcttcaagaaggtacggaatcactcgaacgatatacagacgtacatattgatacaaaactgttaaaaggtcttattccagacgatgaaggtaatcgctacggattcccaagtttaatagtagctttatttgcttatcacggaatcaaatttacaatcgatgaaatgttaaatgaatattaaaaaaagcgccttatttcaggcgctttttttattacttgctctctttattcgtaatagaagctcttacgaagtcatggaacaatggttgtggacggtttggacgagaaacaagttctgggtggaactgtgctgccacgaaccaagggtggtcttttaattcaatgatttcaactagacggccgtctgggcttgtaccagagaatacaaatccttctttttccatatccggacggaactggttgttgaactcataacgatgacgatgacgttcatatacaaccggctcattataagcattgtaagcatttgtttcttcagcaagcttacatgggtatagaccaagacgaagtgtaccacctaggtcctctacatctttttgttctggtaataagtcgatgattgcatatggtgtgtcagggttgatttcagaagagttagcaccttctaaacctaatacattacgtgcgaattcgattgatgcaagttgcatacctaagcaaattcctaagaatggaactttgttttcacgagcatattgaatcgcaacgattttaccttctacaccacgatcgccgaagccacctggtacaaggataccatctgtatcgccaactaattcttttacgttttctgctgttacgtgctcagcatttacccattttacttctacatctgtgtcgaatgagtaaccagcatgacgaagtgcttctacaacagaaatataagcatcttgaagttctacatatttaccaacaagagcgatttttgttttcttagaaagattacgcactttgttaactagcgcaatccactctgtcatatctgcagctggattgtctaattttaagtggtcacaaacgatttggtccatgttttgttcttgaagagataatggaaccgcatataaagtatctgcatcgcgagcttcgataactgcttttgtatcgatgtcacagaataatgcaagcttgtctttcatatcttgagaaacaggcatttctgtacgaacaacgataatgtttggttgaatacctaagctacgaagttctttaacactatgttgtgttggttttgtcttcatttcacccgctgcttttaagtacgggattaacgtacagtgaatgtacattacattgtcacgaccgatgtcgctcttaatttgacggattgcttctaagaatggtagagactcgatgtcaccaacagttccaccgatttctgtaataacaacatccgcatttgtttcacgaccagaacgatatacgcgttctttaatttcgttagtaatatgaggaataacttgaactgttcctcctaaatattcaccgcgacgctctttttgaagaactgaagagtaaattttacctgttgttacgttgctgtatttgtttaagttaatgtcgatgaaacgctcatagtgaccaaggtctaagtcagtttctgcgccatcatctgttacgaatacctcaccgtgttggtatgggctcatagtccctgggtctacgttaatgtatggatcaaacttttgaatcgttacgtttaaaccacgattttttaaaagtcttccaagagatgctgctgtaataccttttcctaaagacgatactacaccgcctgttacaaaaatatacttagtcatgaaaaagctcccttctattttgctgttatataatcaccgttgcaaagcgcaacgtatgtagataacactgtatccatcttattgttagactctttttattttctaaacaaaaaacaaaaaagaaaattgctcccctcatcacaaaaagtaataagtagggagcaattttcttttatatttacactttaaaagtattatcgtccttttttaaagagcccaaaaatgattctacatggacgataatgaaaagtcaagaactacagttcttcctcttcttcttcttcagtttcatcatactcaagttcttcttcagcgaagtcgtcgtcatcttcgtctaaatcatcaagatcgtcgtcatctccgtcttcttcttcaagaaccttgtccaaatcttctacatcgtcttcatcttcacttacgtctgcatcgtcgaagtcatcttcgtcttcttcaatgtagtcgtcaaaaccgtcttcttcaactttacgtttcttcttcggttttggttgaggcaagatttcttcatcaatttgctcatatgggtaccagctgcgtagtccccaacgattttctcctaaattaatgaaacgtccatcgatgtttaagtctgtataaaattgtgcgattttcgcattaacttgctcttgagatagtcccagcacttgagcgatttcttgaaccaactcgttgaatgtcgttgcttgttttttatcccctaaaacgctatgtacaacttcaatcattgaacattcttttagctcttctggtgaatattgcttaaaatccacttatgcggcacttcctttcatcaaatataaccttatatataacggcctgcttaaaaaaatccatactattcattataaacaaaagtcgcacaaatatgctacaaaaaaaacgggaaacttttatagggtagtaaaattataatttgtctgttccttatttcggaagcatatgggccccttgcaatacatacctaatttgcatttctgtatattcttcgagcgtatacagtttttgcagcgcccagcgtctaaatccccacatctgtccttgtataaaaatattatgcgcaagaagctgtatttcttttttatttaatgtaaatgttccattttccgtacactgttctaaaatattctcgaacattcctaccatttgaaactccttttctaatacatacggaagtgattctttcggtaaaaagcgtacctcttgatacattatcaatacttcttcctgtaattcgtccatcactttaaagtaattcgttattgctatctttaaactttctatactccctttttctgtacacactacttcctctaatctttcttttacatgttcatatatactatcacaaactaaatataaaacatcatctttggtacgaatgtactcataaagtgtccctatactaaacccagccgcttttgcaatctctctcgttgttgtacgcggaaatcctttttgtttaaacagttgcaccgcacctttaatcatttgttcacgtcttaacgcaactaatttttcatctttcaccgatgcatgcacattatgtttaaccattcccttcacctctctctattattttttggaaggaaaaagcgtaggaaaatacctacgctttcgttcctacttcgttaacatacgagaaattacaagcctctgaatctcttgtgttccttcatatatttgtgtaatctttgcatctcgcatataacgctctactggataatctttcgtataaccgtaaccaccaaatacttgcaccgcttcagtcgtcaccttcatcgctgcatcgcctgcaaatacttttgacatcgctgattcttttccatacggaagcccttctgattcaagccaagccgcttgatatgttaaaaggcgtgctgcttctacatctgttgccatatccgcaagtttaaagccaatcccttgctgcgccgcaattggttttccaaactgatggcgctcccttgcatattctacagaagcatctaaagccccttgtgcaatcccaacagcttgcgccgcaataccgttacgacctccatctaatgtttgcatcgcaactttaaacccttgcccctctcctccaagtagattctctacaggaatacggcaatcttcaaacataatttcagtcgttggtgaagagcgaatccctagcttgctctccttcttcccaactgaaaatcccggtgtatcactttctacaataaatgcactcgtaccgcgctgcttcgattcaggatcagttagcgcaaaaacaacataaatatcagcaataccgccatttgtaatgaaaatttttgatccatttaaaatataatgatcgccatctctctttgcgattgtcttcattccaccagcatccgatccagatcctggttccgttaagccgtatgcaccaattttcttcccttcagccatcggccgtaaaaacttttgcttttgctcttccgtcccaaatttaaaaattggccatcccgcaagtgaagtatgcgcagacagtgttacacctgttgaagcacaaacgcgagataattcttcaatagcgattacgtatgctaagtaatcgcttccaattccaccgtactcttcaggccatggaataccagttaaaccaagctctgccatttgatcaaataactctcgatcaaatcgctcttcttcatcacgctcagctgctgttggtgccacttcatttttagcaaaatctcgaaccatttttcttatcatttcatgttcttctgatagtttaaaatgcatctccgtctccccctcgcccttttataaagcacggctaataacaagtttctgtatttcacttgttccttcatatatttgcgtaattttcgcatcacggaaaaatcgttctactggatagtctttcgtataaccgtaaccaccaaatacttgcaccgcctcaatcgcgacttcaaccgctgtcttagaagcaaataatttcgcaatagatgcttctttaccgcatggtaatccttgtgccctaagagatgccgctctatatacgagtaaccttgctgcctcgacacttgttgccatatctgcaagcttgaagccaatcccttgctgcgccgcaattggcttcccgaattgctctctttcttttgcataatcaattgcacagccaagcgccgcttcagcaattcctaaagcctgcgcaccgattccaattcgcccaacatctaaattcgccatcgccactttgaatccttgtccttcttccccaagtaaattctcagctggcactttcatatcttcaaaagtaagttgtactgtacgagaaccgagaagtcccatcttatgttcatcttttccaatgattaaaccaggtgtatctttctctactataaatgcagaaataccactttttcctgcctctggatttgtagaagcgaatacaatgtatgtacttgcttcaccaccatttgtaataaacactttcgatccattaataatataatgatcaccttttttcacagctcttgatttcaaactccctgcatctgatcctgcatttggctctgttaaagcaaatgcacctaaatattccccggttgcaagtttagaaacatattttttcttctgttcttctgttccaaaatataaaatcggattcattccaactgacgtatgtacagctaaaattacaccaactgttgcacttacctttgagatttcctcaattgctagaatgtaagaaataaagtccatttctgccccgccgtattttgcaggcgctggaatacccattaatccaagctcacccatcttttgcaaaatctctttcgggaacaccccttgttccatactaggaacaaagggagctatttccttctgtgcaaaatcccgaaccattttcctcatcatttgctgctcttcattaaaacgaaagttcatatattccgcctccatttgctatatatcctttaaataatttggtaagaccactatgttgtaacaaagggggcatttattcgtaaacgtagaatccacgacctgttttacgccctaaccatcctgcattcacatacttacgtaataatggacatgggcgatatttactatctcctaatccttcatgcaacacttccataatgtataaacacgtatctaaaccgataaaatcagcgagtgtcaaaggccccatcggatggttcataccaagcttcatgacttcatcaattgcttctttcgtcgctacaccttcatataacgtataaattgcttcgttaatcatcggtagtaaaatgcggtttgatacaaaacctgggaaatcattcacttcaactggtactttcccaatttttttcgtaatatcttcaattgcttcatataccgcatcatcggtagccaaaccacgaataatctcaacaagcttcataactggaactggattcataaagtgcataccgattactttttccggacgcttcgttaccgctgcaatttctgtaattggcagagatgacgtattcgtcgctaaaattgcgtgttctggagcaatttcatctagattcgcaaagattttctttttaatatccattttctcaacagctgcttcaataataagatccgcttctttcacacaatctaaatcaagcgttactgtaagacgatttaatgtcgcttccttctcttcttccttcatgcgtcctttttctacttggcgcgctaagtttttcgtaatgatagccattcctctatctaattgctcttgctttaaatcttgtaccttcacgtcatatcctgccattgcacatacttgtgcaattcctgatcccatttgccctgcaccaattacaacaatgttttgtacacccattttttcttcccccttaattgttaataaattttataccctcgaactttaattagtggacttcaatcatcactgcgtccccttgaccgccaccgctacaaatcgaagcaattccaattccgccgccgcgctgcttaagtgcatggattagtgtaacgataatgcgcgctccgcttgctccaattggatgtcccatcgctaccgcgccgccatttacattcaatttttccggatcaattcctgcgatttctgtacttgcaattgctaccgctgcaaatgcttcattaatctcgaataaatcgatgtcttcaattttcttgcctgttttttcaagcaatgcgttaattgcataacctggcgttcttgggaaatctttagattccactgcaattgctgtatgcgccaaaattgtcgctaatggctttcttccttcttgcttcgctctgtcttcgctcattaatacaagtgcggcaccaccatcatttagtcccggcgcattaccagctgtcaccgtcgctgtcttatcaaatacaggttttaactttgctaacttttcaatcgttgtatcttcacgtggcgcctcatcctttgcaacgacaataggatcgccttttctttgcggaatcgttactggcacgatttcctcttcaaaacgcccttctttatgcgctgaaaccgcacgctgatggctacgatatgcccattcatcttgcgcttcgcgagaaattccatcttctttcgcaacttctccgccataaacgcccatgtgtgtacctgaaaatgcacatgttaaaccgtcagcaacgtttaaatcaacaacttcgttattgcccattctgtatccccatcttgctccgcgtaaaatgtaaggactgttactcatcgactccataccgccagctacaattagtgattgatcgccagtacgaataatctgatccgccaacgtaaccgcacgaagccctgatgcacaaactttattcactgtttccgtctgcacttcccatgggattccagcggcccttgcagcttggcgcgatggaatttgcccctgtccaccttgaataaccgttccaaatataacttcttcaacatcactagccgcaacatttgctctttcaagcgctgctttaattgcaattcctccaagttccgtcgcttttacatcttttaaagatcctccaaattttccaactggtgttcttgcagcacttaaaataactgttttactcatgtttctttcccccatttcattttttaacactgagcgcccgctcggtatccctacgttgagaagaggtgcaatcattgcacctctttctaaagttgtatacattcttacaaactacatcgcttcttttttctgtccgataacagatcgttctaaaatctctgtcacatcaagagtttgaactttctcttctacctctttcgctttcgttccatcactgatcatcgttaagcaatatggacaacctgtaccgataatggatggctgtacagctaatgcttgttctgtacgagcaacgttaatacgtgaacctgttgtttcttccatccacattaagccaccacctgcgccacagcacattcccgtttcacggttacgtgccatttctacaagattcactccaggaatcgctttcaaaatgtcacgtggcgcttcatacacttcgttgtatcttcctaaataacaggaatcatggtacgtaactgtttcttcaatagcgtgaacaggctttaagcgcccttctttcacccactgagctaacaattctgtatgatgatagacttctgcttgcaagccaaagtccggatactcatttttaaatgtgttataagcatgaggatcaatcgtaacgattttcttcactcctgccttttcaaattcttcgatattctttgtcgccatctcttggaatacaaattcatttccaaggcggcgtggtgtatctccagaattcttttctttattaccgagaattgcgaatgaaatgcctgcttcgttcattaacttcgcaaacgatatcgcaatcttctgactacgattgtcgtatgatcccattgaaccaacccagaataaatactcgaattcctccccagcttttgatttttcttttacagttggaactgttacttcgtcatcaccttggcgccatgtttcacgctctttacggttcagcccccacggatttccttgacgctcgatatttgtcatcgcgcgttgtgcttccgcgtccatttttccttcagtcaaaacgagatatcgacgtaagtcaataattttgtcaacatgctcattcataactgggcattgatcttcacagttacggcacgttgtacatgcccagatctcttcttctgtaataacatctccgattaaactcggatcgtaagcgagcgttgtagacgctgattcttgttgcccttttccagctgccatcatcgctaactgatttccttgtgtattattgaaggcaactactggaacccacggtgcttttgatgttaccgcagctcctttatcagttaaatgatcgcgaagttttaaaattaagtccatcggtgataacatttttcctgttcctgttgccggacacatatttgtacaacggccacactctacacaagcgtataagtcaataagttgattttgtctaaagttttcaattttaccaacaccaaatgtttcttgcgtttcatcttcaaaatcaatcttttcaagcttccctgggtttgaaagacgaccgaagaatacattagctggtcctgcaattaaatgcgcatgttttgattgtggaacatacactaaaaacgttaacaaaattagtaaatgcacccaccaagaaaaatagaacactgaaatggctacggtttcatttatcccgctaaaaacgtaagcgattgcagaagcaattggttcactccatgaaagctcctcgccatgccatataagtcccataccgttaccaagtagcacagaaatcattaaaccaccgataaaaataagaacaagacctgatttgaagttacgttttaaacgaacaagcttttctacataacgtctatgaaaagcccaaaatactgcaattaaaataacaagtgtgacaatttcctggaagaatgtaaatgcagggtatagtggtccaagtggaagatgtgatcctggtgcgagtcctttccaaacgaagtcaattgctccaaattggacaagaataaatccgtaaaagaacataacgtgaatgatgccgcttttcttatctttcagcagctttttctgaccgaaaacattgaccttaaggagatcccaacgctctttaaaacgacggtcaaactcaattttttttcctaattgtatgtaggccattctcgtccgtataagatatacaaacaaatatcctgcataagcaataacagcaatggcagccagccaattaataatcagtaagctattcatttttatgctacccctctctttgtaagccctctttctttttgaatcttcaaaaatatataattttctgaattatatcccctatccccattatataatgagtgagcattcagtcaacagttttttgttatagaacaacacattttttcataaagctgtttatttcggtgaaactataaagtgaaactttaatcagtaggggtggttcatcccccactgattattagttgaacccatcgggcttttacgggcagttgatttcctaactaacttctacttatccaacattttttgaggtgaaaggcttactgcccgttaaagcaggataaagtgaaactttaattagtacaacatctatcctctaaagaaatttataataacagccgtgctacccgtatcatttgtaacatactgaaggtgaaaagaatgcgaaggagggaattcactgatgctctacttatctcttttgttaatatccgttgctctttggattacaattgacctttcatacgggagacttcttcatttaaaacaggtaagctctcgcactttccctttacgtcaaagtgattttcacctttatacatatgggaaagatttatatgacgctttatttactgatataaaacaagcacagcaccacattcatattttattcttcattgtaaaaaacgataaaatcagtcgtgaatttttaaatttgctgattgataaggctcaggaaggaattgaagtacgacttttacttgatcgatttggcagccattctttatcaaacgaagctattcgctccctgcaaaaacatggtgtatctttttcattttgtcataaggtaaaatttcctcttcctttcttttctgccaatcaaagaaatcatagaaaaattacagtgattgatgggaaaaccggctatatcgggggatttaatattggcgaagagtatctagggcataatgaacacttaggattatggcgagactatcatttacgtcttacaggagaaggggttcaagatttacaaaagcaatttttgcatgattggtttgatgatacgaaacagaatttattggatgcttctctttattttccaaaacaacaaccaggtaccatcttgcatcaatttattccgactgatggtgcttatttacagcatacttttttacatttaattaacggagcaaaaaaagaaatctgtatcggtacgccatatttcattcctggaaaaaaaattatgaatgccttattaaaagcaagagaaagaggggttcaaatcacaattcttgttccagaaaaagctgatcaccctctcgttcgggaagcaaaattcccgtactgccgaaaattaatacaggctggttgcaatatttatgcatttcaacaagggttttttcacgccaaaattattatagtggacgatgatatttgtgatatcggaacggcaaactttgatatgagaagtttatatattaaccatgaaataaactgcctgttatataataaacatttcattcaaacagtaaaaaataaatttcatgaagatctagagaatgcatccgtactttcatatagcgatgtaaacccgccttctcttatcaatagaggaaaggaatggattggaacaatatttgctttctttttataggaaagacaatgaataaaagaggtgtatctcatatgattatacggtttggatatgtctcacatgcaatggcactctgggactgttctcctgccaaaacaatgacgtttacaagctttaagaaacttagcaagcaagaacgagaagacaacctgtaccatgttataaagcaaaatttagagcacacaatacgtatccttcattacaatatagcgcatgaaatcccactatatcgcctatcgtcttccatcgtcccacttgcaacacatcccgaagtcgagtttgactatattggggtattcacacatgcccatcaacttaaggatagaaactctacggttttccattaattgaaatgaatattttgtatgaaagagacattttgtttaatggtagttgcatctttttctacagtagcaacacgcttatcaaatccggcttggttatcctgcaccttagttacagtagattttacaccatccacactttgctctaattcatatgttgacttgctgaagtctgttggaacagaacccttttctagtttagctttcttgaaacgaaaccttttccctttagatgcttcatttctagcaaaacgaattctaaatccccaaccagtagcacgaacatcgattttaaacgtccatgactcacgacgccagtctttagctggcacaggcttttgtactgactcactccacgatccgttgatgtattggaataaaataaaatctaaaagcacatcattttgaatgtctaaagatattgttatatctttccctttttcaaagtctcctatcttagtattatctagatggaattgataaaaggcgtctgtatgatcttgacattcaatcgctacgtattcgccaggctgaacaaatgatgtaactttattcaacaccgcgccaccaatcatcccgattgtttgaggtctttcgtttgggcctgtattgattagccagttttcaacgcctacagtacgagcctcaacctgttctaactttgtcgagattttcccagcttctgctttaatttcagttgtaactttgataaattcgttactgtctgcctggtcttcaggtgcaggtctccacggataaacttttttagttaacgatagcataggtgaagtttgttggtataaagcgcctttaggtattgattcagcttcgaatctatatacaacatttggatcagcggcatcagatccgactggaattgttaccgaaactcttttccattctccattaactgttgttttaccagcactgttaggaaagaatacttgtgtagattccccacctatcattctagctgttacagaaaatgttacagtatcaccaatttttattttccctcgcttgattaattcactgggtttaacggctataccttgccattctgtatcagtttgcgcgatagcattcccattgtacgtgtccttaataacagataggcgagcaccttttaaagataattcttcgttagttgttaacgtcttagttcctcttacaaggttgataacatcatcatcaaggttatttacattcttttcgattcgttcgatggtttgctttgttccatttgcatcttcttcaactttatttaacttttgaattgtttgtgatgacgttttgttgatttgttcaatggaactggaaataccgttaatgttttgttctgtttttactacacgatctgtaataccgttttgatcttttttaatatcggatacagtactttgtagcccttcaacgccttttgtagtctcaacgattgttttgttcatatcttcttgagtaccttgtatacgtgtgattgtttctttagttgcctcgtcactttcttcaagcgccttagttacctgactgactctttcttgttctcctttaacagcattgaagtctttttgtagattgtctgctttcgtttcagcttctttaactctagcatctagcttttccgcactagcattaatatcttttgtcacctgttccaacgtttctttcttaactgaatcaacatcaggtacgaccgattcccaagctgcgcctgtccatattttcaaaataccaggctttccattgctaatatcacgccaaagtgtcttataaggtctaagccctgttgtcggtggattctttgcttcaatgatgtctaccgtgttatttttaagattctcttgtactttttcagccaatgttttcgctgcttcggattctttcttagcatcactagctgtttcatttgcatctttcactaatttatctaactgatccagtatttcttgtttctcaccgaatttactaaggattcgattgtaaatcttttttaattcctcgttcggatcagtaagttcacgataatcaccaaacacatatttatcctgtgtaggatccgtaaaagattcatcaccagcaattacacgtgcttctaggtataacttaggagtgaagcctgtatctttgattcggattgtatcaccctcgttaattagttcatgtgctagtccgaaaatacgtccaatcgattgtgcttctactacataagaaacggaagtattgactcgtttccttaattctgttttcatgagagtcataagccgctctggtgtcatattttgatcttctgtttctggagtgtagaaaccaaatttatgtttaccatgcgcattccatcgctgaaatgcgtcattatcgacgatgtaaggtagtcctttatttatgctctccaccgtgataagtttgtcaccttcacctcgtacaaatccgacaagtgctgtgcaaatatctctagaatgttcaattcttctaacctcaactaaatcttttcctagagttacttccttgccagtttctcgccctcgcttctttatcatatctacgtaccagccggtaatcttggaacccattacttcgacgcgatattggatttctaactcaaacaaagaagcaattttctttaaaaaagtgagaggatcaataaattcgtcgatagtcatagtgtggaatgaagaataatccgttattccacgttgccattttgaatcggcaagagcgatatcaataaacgtattaactgtttcgctctctatacgttgaggtttaataatcccatctttcgctatttgaacccaagcaccagacgagtgtacagttaaagatctatcatttgaatctttttctacttcattgttaataacatacggaacaatgcgaccatctcgtacttcctttaaaaccaagttctgctgttgtaatgtaattgcatgtggagtgccgtcaaaagttgtaaaatcaaatatatcaatgttatttttgatttcccaatgacggttatcagcccagtaatcttttggttgaatagctgatataatttgatctgttttaaaatcaacaacatgaagtaatccacttggtgttctcatctaaaacgctccctatatgtaacctttgctgttccaatatcagatggcataatttcgattatattagcacctttattaataacaggaaaattactgaaaaactcttttatgttaatcgcgtttttcccttcaatactgacgtgagtgttctctgtatcgatcactactttatcaccaacatcgaatatataaggtggtgtattttgattatttaaatttactttccaaaatttcaaatcagaaactgtcatcgcttctactggtggtacatcttgccactgcatgatactaatctggatttgagctgctttttccatatgcttattgtctttatcagtccatctcgcaaagcgttctgaaccatctttttctgttccaggaagaaattttgaaatataagcctcccatacatttccggtcctagcaatccacaacctaccataatactgattccatgtatttggataatcaccactctcataaattaaacctgtttttcctggtttgttatcgtatccaataaccatcgttccaaaattttgttcggcttgccaatagagatcgttcatggcaatttttgaaagaactttactgttttcatcgagtatcgctatctcaactcgtcccatttcattgattttcttgctcttacaagtaacgtaagcttgcatgataaaatcttctactgggccaccagggatactttttttaacagctgcaccgtgccatccttttcccgttccaaaatcagaacaataaaattgatatttatctgatttcatttcaccaaccggttccccatcttccattgagctgactttactccatccgaccgtagtggccatttcatcccatataagcctttgattcctttctacaggcttttccacagtttttagcggcatcccaatacgaaaataatctcgatcacttaaagataccccaccaaaccatacatctaaaaaagtgttcggtttcgtaatttcaatctcaattataggattagaatgaacagtacctttattttgaacatttgctattaacccacgtccatccatttcaaattctaccgttttagtaggtcctaacttatatggcatttcacaaacaaaagtaaggactccttctcctaaattcactaattgctgtgggtcaaacgattcatcaataagggccaaatacgtgcgatctttttcatcatcaaagatcagttcttgaggttgatctgtaataagccaattagctatttcttcctttaacttttcagcctcttccatagattcataaaataatgcaaccggtataattatttttctcatttttgtttgtgttcttatcaaacgcccacctggatagtgagggacttcaaggaatgtacgttccaaaggagcccatgcagggcgttttttaccctgcaatgggattacatttgaatttcttttcccgttaaaactaaagaaactgattccagtcatatcatcacctacctaaaatactttcaatctttctttctcgctttcttgaaacttactaacatctgagtagatttcctttgctatttctctgccgtttaaattaacttgcaaaatagttggaccttgtgatgcatattgttgtgctccagcttgttgagttaatggtagagaccccattattccgttagcaatcgcgtcgaatgtttgtttgcgaagcggtaaaactgtttcatcatatcctcttgcatcaccaacaccaatcaatgtcggattacccggtttaattaaagcgccattcgctgcccatttgacgtcgaaagatggcaaaccttcatcagcccaacgcgctgggtttaatgatccgtttatattaatcttcggaacaggaatatgaacaccactaaacatgttcttaacgcctgttttgattttatcaatccactccataacaccttcccaagcatttttaaatggggttgcgattgcatctttcacttttccgaatacttcttttatcactgtaagggtgtctcctgagcttttaaaaataccctcgaacatgtcagagaataccttctttacaccatcccaagcttctccaaacagccctttcattttgctgcctattttgccaatgatgccaagtacctttccaacaccccatatttgaatgaaattccaaatgaattcccatgctcctgataaaatctgtttaatggcatcccatacgccggtccaatcaccagtcagcaaggaagaaaatagtttaattgtccctaagatgatatctaaggccccatttataacgccttttatgtttccccatacatcttcaataatgaatagaacaacaggcattacaaattcaataatgccttttataagatcaaatgcattttttacagcttggacaatctgatccccgttttctttccaaaacgccgcaatctttgctataatcccgttcacaaatgacatcacatctgttaataaaggcattaagtaaggagctattgtattgaatacacctttaataaaatcccaagtagccccgattattcccataattacaggagcagcagctgagattagagattgtacattttctataaaactacttaattgggcatgtacatcctgaacgaacatgataatatccactttttgttctggagaaaaccctaacttatccaataaattactagcagctccccaatcaccagatacgagagctttcatagtttctacaccatattgcactgccgctgtagtttcttgtataaactgaattgcattagctgaaaaccctagtttagtaaggatgtcataaccttcaactagcgcattcctatccccagttgcagcaatccagaattgctcgatagcagcgccaacttgttggatgattccaattgcatcacgaagtggttcgaatactttattcatcgcttcttgacgttggcgagtttgctcaataccctgttgaagtttctggtattcaacttcagattggtcgaggattttattggcttcttcttgagtcatggtcccttcctcgaccttcatttttaactcttcttttttctgagctaacataccatcggcattcatcatatcttcagcgtgcttcttagataaagcaagtttttcattatactcttcttgcgttatcttcccttttttgagattcatatcaagaatggctttagattgagctaactgctgatcagtttgttgcattagcttagctgcttcaacagctctaccagatggatcaagccagtcagtaagagatttaacagcactatttgttccgtttgtcattgcaacaagtgctggttcaacatgcgagaaaacaacaagtcctaaattttctaattgtgatttaacgccatcaactgcacctgataagttatttgccattgtttcagccataacctttgcagagccttcagcagtttcgagggtatttaccatatcatcaaaggcaggtttaccacctttaataacttgaatccatcctgcatacgcttcttcaccgaagattgcttttgcagcagcgatttgttgagcgtcagttaacttcccgaacccatcgtgtaattgaccgataatttcattcattggttttaaattaccttgtgaatcctttacagttacatttaatgctgataatgatttagctgcttctttcggcggggcagctaaacgagataatccggcacgtaatgcagtaccagccatagaagctttgataccgttatttgcaaatatttgagcaattgctgccgtttgttcgatgtttaaaccgaatgtagcagctacaggagctgcgtatttcatggtctcgccgagttgttcaacatttaagttggcagtcgcttgggctaacgcgaatacatcggccgctcttcctgcttcagaagccttcattccgaatggtgtcattgtatctgttacgatatcagaagcctttgcaaggtctaatgcaccagcagttgctaaatcaagtagtggtttactagctgcaatcatttggttagaatcccaacctgcgagagccatatattcataggcctcggctacgttggtagcagaccatctggtatcagcaccaagtttacgagcgttagccccaagctcagccatttgtagtccgttcgaacgcgaaagagcttctacctttgacatttgttttgtgtactcagaaccaacatgaactacaccagcaactgcggcaccgacaccgacagcgatgccgactaatccgcccatagctatagcagctccaccaacagaagaacctaaaccagctgccgcagcaccaacttgaccaaatccacgacctaagatacctgtggtcctttgcccgcttctttctgcattagccaatcctctttgtaactgatcatcctttaagaaaattgacccaaacatcttaaataattccatttattcacccgcctttccgcggatttttgcaacacgagcaaacacttcttcttttgtgagtttctgtttcggtgtttgttcgattgaatcgttgtattgttttacctgttcttgcgttggattttcgcgcttatgtttaaattgagggaatgtttcattacagtacggttgtaaggcgcaccattcttcccataacatgcggtccatctcttttttctttgcggtgagatacaaattaataactatttctgcatccaaactctttatgtactccatatttggatagcgagaagctaacgtatcgatgaagtctatttcatcaagttcaccgcattggaaaaaagcttaaccaatccaacttctgaatctttaattgcagtaaacaacttaactaactcttctaaatttaaagttcgtattgtttcccaatctggagatgtttttttatcattttcatcttcatgaactaaaagtccagctacaaattcaaagaattcttgttccgcttcttctaatccgaaaataaacttcatgataatgtcgtacccaaaagtctcttgtgcagctaatacatcagcttgtgttgcgccttctttatttcgtacgcccgtcattaaatctttaagtaagttaatatcaaccttaaatttcgatttcttcaaaatacgaactacagaaaataaatctccgccatgaatttgtctcactttgtattctttttcttgaattgcaatagtcacatttattcctccttaaaataaaaagagcagggattttccctactctttaacctgctggtattaattcagctgcttctgttgctgttaaaatacgttttttccatggtacttttcgaatgttttctggatcacgatgtcctgtgaatgtcacttctggaacaacttcactttcgttttcaaatcctagctctaatgaaccgtcagataatgcgttatatacgataatttcaacgatatctccacctaaagtttcgccaacccatgctacgtttttaagatagctatcttttgttagacgttctgtagcttcaatcacgtcgtacttaattgttttcccgtcttttgtaacagtctcttctgatacttttaaacccgcaataaaatttttgattttttctttatccaaaaattcaagtgtcttaaaactaatttgagtttttgattttgtaatacgtttcatccccatagtgtcacctggagaaccatcatattcaatctctttaaactctggttcgtatttaaatgagccaccgccttgtgtagcgcctacaggaagttcgtctttttctccataattaaagaaaaatgcaccccaatctccgaataggacattctctggttttggttgtggagctgccatataatcaaccctttctattgtttaaaataagttcgtaaaatgaatcgcacttctttgcgtctaatattcgggtctggatcaggtactttctgacttgaaagataagaaatagcagcaccaaattcagcgctgcttaatctttttctatgaagattgttttctagtttcataatcagttcatctattttactaagatgagcagaagtaccgtaaatatcaattgtaagcatgatattcttccgtccccatggttctttatcatcgttaactgtatacaccagataaggcatttcagccgttgttttcgcgatttcatagtacgtgtctttatgaatctttttcaattcactgtgtaatgtatttataaagtcattcatggtatctacctcattaatgacgaataggttcgtgttgcagcttgcgtaatcatcggtttattattctccgctgcaggtctaaggaatggttgagcatgttgcccttgcgttttaaccattttccccgtttttgggtcacggtacatccatggagttttcctcccgtcaccatcaaccgcatagactcctgtgcccttctcgacgtatatgccatagtcagcggatgtaccaataacaaccttttctagttccgctttagaactaatactgcttcttaaatttccagtatctacagcagctaatagtttggctttagaactaacaaattgaccaacagcagtatgagccgctttctttgcagctaaatgccttgccataacagcagctctatttgattggaatttcatgctcatatggcaacatctccaattctatttgaaaaaatctacctgcattcattggatcaccgggataagtaacgctgtatactttattatcaataactaatctatcttgaatagttacgtcaaatggaaaacagtaaaagaaatgtgtactttcctcttctactttcttattacgtgcatcctttgtcccttgaatggcatctagtacaccttttacagtgtttattactctccattcttctgtaggatatggtccatcatcagaaccatcattacgaagtactgaagcatctttaccaaacttacgaatcatcgattgaatcataagacacgtagcctcactttcagccctttcgtaatactagcaggataatctccaatatcatcataagtaacagagtagttacctaatgattcacttttcttcccttctctctcctgttccttatactgatgaatcaccattttggaaataataccaggataagcaggaggaaactcaggtatttttctattcgtatactcagcaaccacaagcattgtatcttcaatatccactaatagattttcaggtttttcattaggcagctttatttgtacacgctttaaaatttctattttcatatccatctaatcacctacttgtgtaaatgaaaaagatgaaaggcttattaagcccctcatcctgctggtggtgcagttggtgtagttggtacgattgtagccgtaagcactgctagtgattcttgacgaagaatatctccaccataaaccataaggccacgaataccatcagcaaatgcaccttgtagacgcattgcttctgtttcatctaattgtttaccatacccaatagcggatttatgaagtccaagaattttatatttaccaccagatccatgaacttcttcagacacaacgatttgtgaaccgttgataatttgaccttcaacaataccattttctaacacgacaggttgtttagtaaaacggtcatccttagataacaatccaagaacttgagagttaataattgtgaagcgttcagttttaggtacttttttaatgtttaaaattgtatttaagtcaacgatatagtcgtaagcgttttttggtgttaattcaattggagatttatcgctaccgattaagtgttccttaagagcttctgcatacttacctaaaataaaggtatcaactgtttcctgaagtaccgcgccagcttcttgtgtatgcggatcgattaaattacctgctgcttgtactgcatctacatcatctactttgaacgcaaagtactttttctgatccatattaagttctactttagaaggattcgtgtcatcccattctacttttccttcataatcttttacatttactgccccgacgcggttgaagataattttgttaccttcgatttttgttggttttgttgtgattaaatcagcgatagaacgcttgtggaagttcgccattaaacgcgcttcccaaattgttggaataaaagttgctactgacatatattaattcctcctcattatttccatgttttcatatctttttggatttgatcccagttttcgttaatttcagactggttcattgttgctacttgttgacgagtaaacacagcgccactaccagaaccggcatagacttcgcgccctgctgctttaaacttctctgctactttagcttctaatgaagtattgaataactcattaagcttcgccacacgactttttgtgtcatctgcatcagcaccgataacaaagtccacaaatttgaggtctaatcctacttctgataacgcctcagttgcagcccactgcatttctttttggtgtaataccttttctcgttcatcattttgctcttggagttgtttcatttcgtattccgctttttcttgagcggtcatagaagcagtacggaagctttctaactcttttttagtagcgttcaattctttcgtatacttggtacgcactttgtcttctgctgattgaaccattttctcgataaacgcttttgtcgcttcatctaactgtggttcttttgtgtcatcaacaggtggtgtttggtcatctggtggcgtatcatctgcaggtggtgttggatcagaaaagaattgcagatttgataaacgtaatggtaatttcgttacttccttttctttaaaaaactgtaactgcttatgtttttgtaaaatattcatcatttttcctcctttgagttcctatgaatacgccctattaagttcataatctataagccctcaagtgtttttatttgtattattcaacaatcatccaatcttcagctaaaatatcagatacacttggaacccacatcgcatgagtgccatcagcacaacgtaattgcaagtaaggtcgtaccttaaataaatcaccttcatttaatccccaagcttctgccgtttgtttattacaaggaattccatcaggatatcctttttgataaacagcaaacatattcttaccgttccaacctttacgtgacaacttattgccacttttcattaattcgagtgcttttccaaaattcattattctagaccgtccttccattcttcataactaactgctgtaataacttcattcctacctgttgtcgggtttctagcccttctctcaataaatggactaacatccgctacttccgtaatgaaagtacagcggcagcgtacaacctctttagcaggtaaattactatcgtgtggatattcacaactataaccaccaactttaaataatcctttaaacggtactttttgatggtctgctgcttggtgagtaggacgtgtacgtttatctaatgtagaaatccaaatcttctccattgatacaccttcgtcaaaagcttgcgaggcactgtcataagtacctaagttttgtactctagcactttctgtccatgcaaccatttgtgctttcttcgcatccccatcaagaataggcttaatacgattagccattaccgcatacccttcaccttttctaaggccgatggatagttctttacgtattcggctaattatctgtgctcgatgagtacttaacctttgattgagtgtcattttatcgataggcatttgtaccgctcgcttaatgacgttcgggtcaatcagcccatatgaaagggatacaccaacctctttttcgataagataactcgtataataaaaagactccccatattgagtggagagtgtttcattgagagttttctttttctcataagttatttcattaataacttgctgtagttcactttgcaggttcttgtatcgattaaatcgacgcatttcctgcatacttaactgctcatttatcgcatatttagcataataaaaagccagtattcctctgacttcttccaaagcatctttatacaggtagagaatcgccttttccagctcgtcctctatcttttggaggtgtttctgcttcttgtcccattccatcgttttcaccgcctttatgtacagtgtctaaatcgatagaatcaacctcttcttccttcatcttttgtaattctgcctttggatcaggaataacagataacatagataatcgtgtttcttcgcttattaaaccctgtaatttagactgaacatcagcttcatcagataagtttgctggaaggttacgtgtaaattggaacgtcatgcaaaggtaatctaattcttctttatttgagcgtaaattccaagcgtcgaatagtaacttaaattgttgtcgcaatgacttagtgaatttcatttctaatgtaccggattttgtttctaacgatagcaacttataacgaatagcaacaccagtaaggttaccaccaaacgattcatcagaaaggttcacatgcttcgtgaatcggcatatattcttttctaacctgtctagatgatgttctaaaatgttgtcattaaggtccttagttaaaaaattagcctcgccattctcgcctacatccagagctccagtttgttttaatttctcaatggtatcatcatctatatccacacctttgaaaatcatataagccaaacggaactgctcaatctcactatttacatcagagatagccctatcatatccctcaataagagaaatagctttatcgacatccccctgcaattcttcattgttaggaaatccgataagtggtacacctttgtataaattagtaattcgatttgtttctttcaacttatctaaatcttcaccagtgtactcaatgatttgcgtatcattgtaaaattccactttgtatccgtctttgaaatcatcaccatcgattactttgattggatagcagcggatagcgtatttaggctctgcaatgcttgaattagtaagaaatattgcttcataaggtttgatattcataaccttttcaattccttctttgtcatggtaaagcagtctcgctccataaccgcaaatagaagcaaactttcctgtttccgcgtcagcatcttcggtatgattcgattttaaaaagtcttggatacgcttcaatacttcctcgtcttcatgatctagactgtatgaaataggcaatccgaacatatatcctatttttgtatcaataatttcagaaaagaaatcattgtttagcttgttgttaaccttgtccttattcccatcacctttaaactcacgtgtgaatataggtacgcctttctcacttgctttgtaacgctcatacctatttatcatgcgttgttttagtggttcaaactcatcaataatctttttgagtagcttaggtgtgggttcaccattttcttcatccagtaacggaatgtagtgttcaaacatcgtctcacctccttaatagattgacttaacagctttcgctttgttattagttaccacgactgtatttacaaaataacgatcaccatccatctggtggtcattttctttattcggtttatcttcaccacgagctgtagctttttcatcccaagtataagaagcgtattcacgaaatgtttctttacagcagtcgttgtattttattttctcttcattcagtagtctcgctacattacgtataccatctataacttcattcttagctttaataactttgaaacgattcttctttaataaagcgataaatgaagccgctgaagggtcaactataatcccacgaatagaaatttctccgacaaattcttttagatcatccagatactcatcatcagttttttgttgcgagttcttacgaccgtcataatgatattcttttgttttgtaccatataccatcacataagccccataatccatatgtcatagggttttgtgtaccatagtcacaagatacataatacttctcgtattctctttcttttgtttttacaacatgtttttctttattaaacatgtcatatacaatgccttctgcaagcacccacagtcctaaaatgaatcgttggaagaaaactccgctatacatgcgatagtatctttgcttcactttttcagataaagaaagattatcgtccattgtaaaatgaatatgtagcaggttcttgtcttccttattatctatccattcgagtttgaaccaatgatacggaccggcagggttacagttaaaccaatactttgagccttcgatagaacatcgtcctgttgcctggtttacaaagctctgtggcataagagcaacttcatcaaaaaacataccagctaatgtaataccttggataagttcttgtgatgattcgtccttaccaccgaatatatagaaatgatttgtgtggccatctttgctaatagtaagcatattatctgatagatggtccttcactttatatttacgcgatttcaacattttctttaatggagtaattacgttacgtcgcagggatccaattgttttacctgccatacctaaattctctccattaaatgtttctgttccccacataacataagaaagagccatcgatacagttttgccagcacgaatagaaccatcgcatataatgccgtcatgctccttcacaggtgaatcttttctccaccaagtaagtacttgtaattgtttcttagagaatggtctgaatttaaaaggagcaggtttaagtttcatcttcccacacctctgctgttttaccttctaatgcatcgataaatccatcatcttcatactcttcaccttcatcacctttaatgcgagaagtatctgctttaattttatcaatttgagctttttgcacttccatctgtattttgtggcgttcttcttcgattttccgtttgaaattgtcaggtaccaaatcaaagtactgtgatagtttgtccagtgctttcatcttgtcagcaagttttactgacacaccatcttttccaagctttacttcggttattatagaaccatcaaccatatcagcctcatgcaagtctacataattgataatacgagttatttcattacccgcttcatccttcatagggccgaacatccccattacaggaacttccttctgcccaaaggtcacatagttagtaatgtcagcaaaagcaatcttaatgtactcttttagtacatccatcgcttctacaaatacattctcgactaactcacctttaagttcttttatataagaggcaacgcgttcacgtcttaataatcggctagcttgtacatgagcaccatctttggagtaaccagcctttaacgcagcttgtgtaccattgaagtatttcacataatacaaacaaaagagccgttccttttcggtcagctcttcatcctctaaaatctcttttaatttttctttcgttttgggatttttaacattggtaacgctcctttttgcaatagtaacgttaccattcatttgctcatcccatttatcttgtgatttccactttctgatttgcgaaggtttgagatttaactctgctgcaatatcaactaatggcttctcacctttacttgctttatatatttcgaatgctttatctctatctgggctacgttgtctagccataaccaccacctcgcggtaatccctaatttattttacgaaagattcaaattactcttttataaatatgtccaagttgctataatagagttaacattgtcatctggaaaagtaattcgtccccaatacgagttacttttcctttttttatggctacttttctaagaattcatccaacgttttaccaagcaaactaatcatcgcttctctcttttgctttggtgttgtattatcttgcatttcattaaagataggaagtacactttctaatttctttttatcgatgcgttcatttacaacgtcctgtcctaacattgaaataaatgtaccaattacaacagcttgttcttgtttatctagtttcatttatctcactccctttaattacgccacatttgattgaatcagctgtatgttcgacaatagattccgctacaactcttccatctaatgaaactccaactttacaatccataggaatagatttactatcgttactcttcttaattatttcagattgtttatttattaattgaacatgagttatatccgctttcgttgctaattcctcttcgaacatagttacttttcttgttaatccttcaatcgttcgttgtaatccagtaacttgtattcttaattcaacaatttcagttttcatttggtagttttgattatccatccttcatcctcctccaaaataaaaaatagcacttattccagcgctaacatttctttctcgtgcatttcttctaataatagccacagcataaagtaaccttgtgcaccagcgacttttctaatgaattgatattgttcttccggtttactaactaatgatctagaaaccttataaatattttcttttactgtcttccaatcaatcgcacctaattccttatgcatatctgtacaccatattctcgataagataaaacgcatacctagaacagcattagaagcattgattttagaattgttagcattcacatgtcttttgacatcatcggagatttcatcaaaatcaagtttgaatgtttcgcatataggactaagatacttaaaacttatttcattaatatcctgttccattaccatcactccctccaaaataaaaagcagtatttaatcgtttacatcagaaacaaattcttgcgatacatcttctgcttcacaatagacatctaggtcggtccaataattttcatcataacgatattcttgtaagtgatctgtaggccatcctatttttttatgcctagcaagaacttcatcataatctttatttctagcgtcttctctaaatcttctggaagctagctcttctgctctctcgtggttttccgcaatgacatacacatgtatttggctatatcctgtatatccattcgtcacataataaagattcattttctttcttttcttcatatatcgcttctttttcataaaaaccactccaaaaagaatcttattttgaaaaatccataacgaaaactaatttatgcagggaaatgaatagacctaacagttttagtttacataatagttattatatgacagtcattaacatgggaaatacgcatggttgagcgattcttgttttataccgttatacagtttttatacatcgttgatttaacagcattcttattaatcgttaaccctaatttcttgcataaacttcactatgttaactatctgtattttaatttaaaattacccagtcatttgctaacatatccgtttgggatgcgagccagccaacaacaattgtattttgtgcagtcttcattgcaatggtatcaacaaatgaaggttctacccctacatactcgccgtatccatatcctaatcccttagacaatttattaccttcaataagatacaaaaacatatttttaccgttccatccttcacgagctacgtttttcccttgcactagtgccactatcgcttgtccaaaactcattattcaacaacctcccaatcttctgctaacatatcagcttggtacgcttgagcgggtacaaccccaccattatcctttaatacagcgaatatcatatcgtgagtttgaaattcccttacatatccagcgttcagttcttcttttacctctggattcttggagagaaaccaatatccaccccaaatagacctttttacttttttaccttgtttcaacgcttctagagcttgaccgaaattcattattatttcctcctctatttccgttcattgtgtccatttgttttctaaaatgcaacacgtttgcgcttatctttccttaacaacaaacaagacgcccccagatcacggaagcgcctacgataattgctattggtttaattaaaactgtcgcactctaatactctcattttcttgaattttagaaacggattcggcaatcgtccccccatttaaggtgacaggaacactcatcattccagcactcactattcctccccgcgctaaacctgaaaatttattagtcaatttctccaatctctctaatgcagcaacacattcattggcagcttcagttacttccttcatttgttttaacgcttctgtcgtatcgacatcaatgttaatctttaatttgttattagccatctacaattccctccgcagctttctttaacttctctatcttttcttgcgcatctttaggaagaacgctcattttagtgcttaattccttttttaaatgatcaatcgtgttgactacaccttcaattctcatacataagtcgttaattactttttgttgatctcgatttacactatctaaatcattaactaatttttctaatcgatcgattctttccgcaagatattgattatccatccttcatcctcctttttaagtgtctaatttgtctactatagctgtatacattcgttatccatctaacatagttaaacgatctttaatgtgtaatttttatataacaaagaaaagcacccattatggatgctatagttcactctttaaataaggaatactaatgattttattgttgcttaatggtatggtgactgttcttaattccttaacagctgctccatcacttaaagtgctatttcttaattgtttctctaacaattcgttgttcgctataattgttatttctacattttctttattactcatatcctcatcctttctttaaaaaagaaaccgccactattaaaatgacggttcttttacggcttataaaaatattaaaggggatgggagaaattcacgttcgaacataaggggatatgtctatgtgaatcgaatgccaagatcactcttaacattctctcagccactgcattcccgtattcttagctacgcactttacgttcagtgactgagagaagactaagaatagtcctccctctgaataggtatagtcaatacttcggctgtcgcatagccttcgttgaccgatatcgaattataaaggattcatatcaagacgtttgtatttcttccgacgtctttttaaataggtggtgtacttgttttaatttttactacatgagaatcaacccctttattaaatgatttgcagcaatgagactcgcaatatcccatcgcttattgtgtattgaaaaaaacatccctatagaatctatatacgagcaaacacttggtcacccaaaacagataccatcggaacaggtctcggtaacctttcatatatagggggcatttgtaccacaaatttcgacatttttcgcaactaaaatcaaaacatgcagaagagactttcatttattctttttccaatcttcttatctgctctttctaaatggttttgaatagtagtttttttcacccctaaataattagatattttttccatcgttaaaccatgacctctagacattacatatatttccttttctctatccgttaaagttgataatgcatcttctaactgcatacggtcccattcagagataacactttcttttgctgctgtatcccattcatatactggcattacagtactacgcacatatctttgcattaataatgggtcacatggtttctcacgttcatatgccgccctacgttcaattcctctttttttccctggctgtttagcagtacgcatccattctagagcgtaattaatatcactgatcattccattgataatacttatatccttttctgttgcgcctaccttagaattttctaattcttttcttgtttctatatactgctgcattaattttttcatcagccaggttcctccttttatataaaaagaggacgctgaattgtatacaggaaaaattgctttcctacacacaaacgccctctgaatgcggactattactttcattgtttttttatttatcattttaatacggtaagtgaaattttaatttaatcctcttttttttagctgctccgatacatttttaccatctgcaataccaaagtatctagcaatagctgtatacgtcattccgtcttctctcatagctgcagctttcacacaaattctatcccattcttctttcgttttcctttttcgcttttgcacttcttctttgccacctagaaatgcgcctagttttattatttctttccctatggtgcaatttgaactacaatgatccaattgctgatatctatactcacaatttttacaatacttatcctgcatatttagaactttgatacgcgcctctttagcattcatatcttcaccctctattactttaactaatacttggccattctaacttatcaacataatataggtaatctactaacgcacgattagttggtgttactaaatatgctctctcatcaaatacttctctttttattgattttggaccaccattttctgctgctttcatatactctttaattagcgcaaatggaactaagaatatagaatgttctttactaaactccaataaaatgaaacaaattgctcccatctgctcagcttgtagtaaccatttgtattggtgaggctttatattacttaaatcaaagcgtttttcttttatagtagccttggcctcaaatgcaataaatcgacctttatatatcccatcataatccactgtagattttttctcgtaatatccttctttaattcttccatccctatattttttcgtaactacaacgggtgtagctcgtttttcaattaatgcaatttcattatttctatacatatcgtttgaccaattaattagattttcaaatgcaggtccatgtgctccgctatatgccatttatatcagtctcactttctattaaaaggattattttattaagttatgtttttttaactgaaaccaagtctccatgcctcttacgtctttctcataaattggcattacatatatctcttcgtttattaacagttggaattctacacattgtttttctctgttccatccgtaagatgccataggaaccattttaggctccgctttttctgtcattttctcttccccccctgaataaaactcaatattccgtcaatactgtagacaacccattaagttactttctcccagttcccccttggagaaccagccgggcagttagcttttgctagctgctcttttagttatttgtatcttcgaatttcgcttttaaacgttcataatctcgtctttcttgttcttcttgtcttttcttatattcttcttgttgtttttgatgcgctaagcgtatttcattctcgtattcttcaatttcttcgtgagagattatccctttttcatgcaatgtttttcttaaccaattatgctttaacacatatgctcttgcgttgtatttaccgtacatactgatttcactgctaccatcatcttggaattgttcaactactaatattcccttatcttttgtaacgatcgtaatagccttagcaaattgtgccatgtgtgtaaaagctatttctttcccaactaaatcctcttctttttccataaagtacatttaacattccccttttctacaaaatgaaatttttgttcaaattacgaataccatctactaaactcaatattgaatacttccaaggccctacccgccaaataaacaggattttcagctccacttgttattcctacaagaacatcacgtaacaatttatcttgttctacatgtgctttttcgctattgcaccattcagcttctgctatgctacggatataatctaatcgttcgtttagttgcttctttgttctaattggttttgccattgattatcctacctttctgataaaatgaagtttttgttaagttttatctttacattccaaagaattttttagctattttgtctgtatttaagttttttgtgcaaaaagtaagataacaaaggatactaaccgcaatatttcctataggtactaacactaaacatataataaaaatatttgggtaaatttcttcctcttccatcactcgtttcataagtttacgacttacaattacactccctacatataggagcaacaacactattgaaaataagatttgattagcaactggcaatataattcctccttttctaataaaatagcgtttttgttgaatttttattgagtttacattgaccttttgttgattttttcttcacatttaaaagaaacaaacatatggatattgtatgtagtctctgcgctcatagagatctacctttcttattaaagagcatgcttatatgtgtgctccttttcgcttattatgaaatatcgtttgggttaaaactccaactcgtatcgtttctttaatgacaggctccataaattcacataaggaatacaatattaaaaatttactcatgaaaatctgattacaacttttgggatttttctgtttcatgagacattcatctaccttattgagagcacatatacaagtgtgctctttttattaataaaactaattcaaataactattttgtattgtctgctttaatcttttgtttagtccactctacaactactcttctagattgaaaccagtgtacattacacgtagaacaaatatatttagtgcaagtttcaacataattaaccgtctctaacttattcccacaatttaaacagtgttgggccaatgtattcatctccttttctctcaaataacgcttttaataaaaattagttgaaacaacaactgtcggctctacagatacttttattaactttctatagtatctttctccattgatttcaatcgatgtttttcttgctcccttatatagcgtgtctaaacgcttaaaatcactttcagaaattaacttccaaacaaacacatcatccatcgattcttcaacatttctagtatcataacgctcccattgccaaaacatttccgatagccaatcatctaagtcagaatgcgttgtaaaaatgtacgcttcatcaccgcagtcgtcttctctgaatacaaaatagtactccgttaatatgctagtgccttttccttctctttgaacgaactctttaaaagcttcccaattacttttcaatccgccccaatctaaacttctcaccattctattcccctccgtttttgtacaaaattcaaattttgtttagtttgttcttgctgttttatattcaaaaaaactggaagactttttatgtttatcgcaagcgtatacatctgtaggaagatgcttcctgccttgtggatctctagcgaatataaaacccttggttgttgcatcatttttacatccaacataattgcatttctccactttcattcccctccaaaatagctatttttttgactgttcaaatgcttgtttctcacaatctatacacgctacaatgtcaccagacttatcgaattgataaatagacttttcttcaatatccttatttaaaaagcaaatatcacaattaaattgctttttcttatctactaattcgtcattgattttcttagttagttttacagttccaatttcttcatacggttcaacagaataccctttctcttgtaacactttcgcaatatcttgcatatccttccaagctgctgtaccttgtccaaatttaataataattgtattcattttttattcccctttaatttttctatttattttttctaataatcctgttattaagcctataatccagcctaataaaaatatgaacgtatatcccactacaccacctacttaataacaaatatttatatataatttacaatctaatccaacaagaattttcttttagtctccgcatacgttcttttgttgataaagcaggtgttgttaacgcttcttctatattccatttcaatttcttaatccgatcgtaaactgtgctatatcttaagccattttcctttgccttttgtatttgttcatccgtcaatacacgattacattcattcgcacgcttcaaagtttcctctcgactcaatggaggtttagttattgaatctattaaactccaacctctttttcttcttcccttaaatgtggttcttcctatattatttttcaaagcaatctctttcactttagaccattctgaagcttttcgaggtgattcagtcattgcaaaatctttatcccaacccaaatttctaatcctatgttctaataatttacgactaaccccatgcttagctgctacttcataatcttctggagtgacataatattcatatgacgatttcataaaacccatcctcctctttactcaatatccacttgcttgacgttcaaagttctccttatttttatctttgtaggcttgtacaatatcttcaaatttgtacccatacaagtaacaaagacggaagaaaataccaaaagccttatgcaaatgtgttagagttacgtttaaatctctatattggcaccacgcacgtttagcggttaaaatatcctgcatataccattcaaatagcatattgacgcttaatatatttttcttcataatgtattgttcgcggaacattgctgctattctacgctttaatgtatggcgatctaattcaattacaatgttcatgagaaaatgaaacccatcaactaattcaaccaacagcccttctttaggagtcccaaaccctacactccacattttaaatgctctcgtttcattccaagcctcgccaatctccactaataatgcacgaaacagcatgtctaatttgtcattacccttataaccaatgcgtctatcaagttctttttgcatttccattaattcactaatatcaaatgtttggcttgtttcttctttagtaatgatatgcaagttagttgtatgtctcattgtgcatacactcctttacgataatctttaataatggcaccattctcattaaaatatgcaatttcccaatacggattaaatctaaacttatgcggatttccatctaaaataacgtacaaatcatttttgcaattcccgacaatcgtcccttgtcttccctgtacttcgacacgcatcccgcgtttagcaaatggtattcttctgtagttacacatttttcgaaatggtgcttcttgtccaaaaagtgtactaatatctactactcccagatacttgcaactaatgaacctttcaaattgttcgaatggcatatctataaagtgctgctttttaaattgtttataatagtggtattttgctttctcttcactttccttaaacacaatatggtcacatctccactgcggaaaaaccgttgaaatatgatacttgtatgtaggagtatccattagtttccctcctgtccaacaaaggagacttttgaccaatccatttctgctattttttcttgattaatcatctccaaaggtacttctagcaaaaagcgcgccgttttgttgcaattcgtgcatttcacatgaatagttttttcttctgcgcttaccatgattccgccaatcccgttatcctccgttgtaataattggcaatacagatgtaactggaccttcattttcaaattccttttcaaccaaactagccagtatattcattccacataagcaagtaatttcaaatttcatattatttatcccctttaattgttttatatttgtaactattagtaagaccgtcaattctagctcgtccaattcccacaattgacggtctctgagcctataacacttcaaatctattaatcgatttattatcctttgtttctccaattgctttgttcacctgctgtttacttttgaatcttatcgaataccctaattgctatagctataataagactgaatattacaaaaacaattaatgtatccttatccataacggattaacctgccatatcttctgcgaaaaagtagatttctagttctttaggatctatttggaacctttcatctgaattattgaccagtactgctacaagtcccgtttcagaatcttgatgttgtacagttaaaacacgtttatcgttactaacgaagtcgccaggatggaattcgttgttttttctacctttagcagcgaatactctgcggcgttcttcccaatactgctcatcttctgttgcttttcggcactgatcagcaaactgccatcccttatctcctacactcataaccgattcgttaccccacgttccatataatgcaataccgccattctgatcgataaaagcaatatcttctactgctgcaaacattgtgtagtctttgccttcaaacgctacccattccccttttgcaataaacggtgcaatgatttccgtcatatttatattcactaaagtcactttcatatttaattcctccttaatttgtactaaacccaaaaattaacgatgtatgctccgttcatttgaatttcttttcttgcataagtcgtttttccatttttaaacttgactggtttatagaacccgtttttactaacatcagatgctctgttagcatgttgatattgatatattttaaattcatttgcatatacaaccggatcatgtcctgctccccaactgtcccaacgaccttcgacaaacttagctggatcatcacaaattgcataaatactatcttcttcattaattacgaggtatatatcatcccaatcttgcattgttttcaatccattcttaatagctctcattgcatctaacgcaccaataaaatcagcttccatagtaattaacatcctttcgttatttaagatatttagttacatattgcggtctaaatccactatctaaatagattcttagctgctgtggctcttgcgattccctagccgcgcagcaaatcctctctgcggaatcccaatgaaaacttttgtcttcacttctcttataacgccatatagctttgacataatccatgaacatgtcaaagtgattatcctgttttgtagagcgaggcagttcgtccgcgctccagacgtcgcatggaataatagccatgacatctacaaagctcgccaatcctcgcctttgttttacatgcgccttctttatatcaaaaggagcactttgtactatatctggttgttttatagaatcattcagtaacagtgtcagttgttccgtcatggtgctcaccttctaactgcatttgcagtgttgcagtgaatccgcgttctaatattgatccgataactgcattcatccataaatgagttccgatcttcctttgtaaaagtgttataatcgttagtatttcttttgtagagagtgagacaaattcacctgatttttcttggttaaattgcccaccacgcttttctatgtttaaagtaatgttattttctttcacatattgttctgccttaattagatcaaactgacgaaccttatcgcgtccatatttggtaattaacgcttttaacatgtctactaaaacattgacatctatcacttttaatttggtttccatctcaccacggcaagatttgcataacgttttttcgcatccctcaatgtgcatatttgttacatcggattctggtattacatcaccgcaaatatcgcaccattcactattgtcaaacaacgcactgaacataaatttcaactcccaacctttaattttttatcgtttatatttaatgcacttattgcatggccgctagtgcgtttatgtgtactaatgtgttataattgcaaatgtaaattctttcttaactacccatctcgcaaatgggtattttttatacactttttttgatttcttctactatcttcgaacttccactaacttcttctagatgcttagcaactttcaaaacttcatttctttctttatttctattttgttgatcactcttctgcttttgcatgtacaggtccataagttccgattcaatcgcaactgcttcactagattgtttgtcgcatagtgtttttaattcttgagcagctgtaaactcaccagaattcattgctctttcacattgagaaagtaataacttacgattcatcatatattctcgaagctttccctctaaaagttcagctctttgtacatgctcaggaagcactctgtctcttattcccaattacattcacttcccgttcttgtttacggtcatcttcatcgagttttcgctcgatgaagctaccgcctttgtatgctgctaatgctagtaatccaagtcctaaaccaaagatacacacggcattggtactctcaactaagacaatgtccattacgcaataataaatacctttttagattcaatttcctctgctaattcagcagttaaatactctttaatgttgtcaattgcttctagtttccatgcgccaccgtccgcttcaaataatgcacattctggacctttacgcattcggaatataaaattactttctggttgttcaacttcaacaaatgttctgtatggctttaataaaaccggattaggtactttcacattccctacagtagcaacgcccatttttgctacgacactttgagaaacaccatcgtcaccaattgtatttacagcctcttccttgacatttccaacaagcttgagcattaaatcacgatctgaattcggtacaaatgcagactgtaaactaatattaaaattctctacatcatggtatctttcaaatgaaaaacgcggtaataatgcttctacttgaataaaattactacgattatagtcattgttaatttgcgtgaagcaagaaacacttgttggactttcaatatgaaccattaatggatgatctccatcaaactgcgatttaatataggcaactaaaccagaaagattatttacagtgattgtttttgctgtcggtttcttaataacatgcataggttgtgttgataacttttgtccattaatctcctcaatacgtgtatttcccaatccaactacatattcaattgctgctttaatcatttttcatttccccttttctttttttagttagttgattgttgacgtaaatctacaactttatcgcctacatcattttttattacttcttcacctggatcataaaaggtttgtccaattactccagaaacaagttcttgtcctactaaattaccttcattgtcataatccataacaattttagattcaacttctgttgcaggaactaacgttgttttagcttgtaccttacaattcagtacatctcgttgctgatcacctgctactgcaatcgtaatattaattttccttacctttttagggtcggtatttgggtctgcaatgttctccaaaaccttctttaattcaatatttactctttcaaataaggccccatctgcaaaactatttaagtcaatcatctttctacctcctaagcggttttactaccgttaaataacgggcgccatccttctataaaactgagagcttccccaaaatccttttgaagtatattaggataagcattcacttggtaagcatcttttaggttcttccataaagcggagtacacttttcttgttgtagcgtacaattccttatctatcttgttttcattccatagattatgtactcgtttatttacagcgtttctaattacttgctgctgtccataatcaagcgtgatacgtttatctatatcacttctcattttctctacatcttttttcagactatcgacttctccatttaactcaatagtcattttcatattggccaggatactttcttttgcgttcatcgctttaggtttgctgcgaatatattcttgcatccttttaaactcttgaataaacttaatcttcatttgaacagcttctcttgtgttgtaactcataacaactaatgtaaaggcttcttctgtcatatcaattttcggataataacgtcctctgctctcataagttcgctccgcaaaattgcttagtgaaaattcgtaacctgcatattccatttgttttctaatatctcttagtacgtcagcgtgatttttacaaaacacctcagcaatcgttaaactatttgttactgcctttccattaacttcaaatactaactcagcatgtactggcgtttcatttactgctgctaattgatccattttactctcctcatcattcgttttttgagacgtctcatttagagacctgaaaggcaaaaaaatatactacttcatcaattcatcgatggttacttcatacagattagctaacaaagacaatctatgtaagttaggttcacgttttcctgtttctacttgagaatatgaattcctatttgtgtaacctattgtttcagctacttcaatctgtgtgaaacctttagaaagtctaagttctctgatcttttcagtgtttaatttcattcggtatcaccctttgttcgtttcgttaaattgagtatatcacaagaggtctctttttgagaaccccaaaattataaaaaataaaagtttttaaaagtgttgtcatttcgagaacatatttgttaaatttaagatataggaaatgtatttatataattatttttagtgttagtaaataaaaattactaataaatattaaggggaatataaagtatggattacaaattaattagtagacgtgtgaaagatataagaactgacatactgcgaattagtcaaagggaatttgctgaagctttagggatacagagtagatcagctgtttcgatgtgggaaaatgaagagagtacaaaatgcccatctaaaaagatgagcttagaaattgcaaaacttgctaatgtatctgtttcttatgtactaggcgaatcagatgagaagaaccctgacgtcgctgcaaaagacgaatgggaaagacttatgatgcaagttaaaacaaaatcacctgagaagcaaaaagaacttttagatcttattactaacttagttaagatatccggcgattgatagctttagttgctaccaaccgctttttttatttctgctagtatatcaaaagatactgaatcccctttctcagcactgttcattacttcttttagtacgtccccgaatttatctactacagttttattctctaatttctccatccctaaatcctccaatgtaatctttatagtttgtgaatcattcacatactttcgaagttagcttttcacaataaacttcgaacgccctctaaaatcaagaaatgcgattaccccttttggataatcgcaactctacattttatattaaattttaccagcctccgccacctggttcggacatcatagcaactttaggctcagacattgtatattctttttgatctatcttgtaattaatattaaaagtaatcatacccacaaaagctaatattgggagaatcattaagtatttcttcaatcaattcacctctttcacataagattattataccattttttgaatattaacccaagtatattttagggagatttgcgtaaaaaaggctctttttttcgataaacattctatgtgagatttcgattaattctcggtcatttcttgctaaacctaagaagagtgtctgaaactcattaagataaccttttgtttctttcattttcagtaaaatagactctgacgcttgatagttacctctcttaaattctaaataagcttgatcatcatcatccaaaatatcaggcaatgtatctaagtctcggtaatgatgaatcttcaagaaaatgattgtgctttttattcttttcttctttctttctatgtctttatcaccttcagagaaatttgtttccagaattaaaagtgattgttcaaggtgaaatttcgctcgtgaataactttcaaataaaaaagactctccgatattatataaagaattggctttttgaattataaaggcaggatttttgtcgcaaatttctaatagatcattacaaatagcacgtgccaaatcaactttattttgcatcatataagttacaattaaaccctctttaattcttgctaagtaactatcacgtttgtaattgttaaatatttttttaactttagtttcgacaggagttatacgcttgaataaccttttatattctttcatttggtataaagcttggcacatcaaaatactagttaggattttcatctcatttgttgtaatttcatttttacacgattcaagatcatcataaaaatctgccggttcatatttttcattaactttaaaatgtgtatatataatatcataaaccttcgcgcactctttgttagcgattgttggagaatttttttctgactctataagttctttcaaagaatcgaattgtctttgaaatgcagcatattcaaaagcttcccgtttattttccggttttgcaaatgctaaatagtcggatatcatctgttcttccattgatacaaaagatttatcatacagtttcataatgatctttactagataaataaaactaatttctgtttttccatttagtatgcttgataaggtactttgagctattcctaaatacaaagctaactcacagttagtaattttagatgcgaataaatcatcattgattttttttaataagttcttcatagtttgctcttttgtttttactattgtactttcttgcatcccttttgctcctcccattggaacaaagacttcgctcgttttctcaacttttttaaaggaaaaataataccacagtaatgatttagtaatatcggcatgttataatgtaaatgttactcgtgtagtgaccgaaaagagacttatggcagatgttcccctcgtgagtcgggcgaacggtgtaagagtgggccaaatcactcttacacacgctgtgagtctttttttcgttccgttttttattgttatcataataccacaaatttcccaaaattctgtcgtataatagtctgaaaactattgagaaaattgaaaaaccgctttgtatcaacgttttatgtattacatggaataaaaaatgcaattatgcatttcatcgttttttgaacctgtatgaatattttaccacaaatacgaactctcgttccttttatttctacacagactcataatgaatcttcacataacataaaggtcacataattaatcataccattcgaatatataccattattaccactcgttcgcttataattgtcgaagattataaagggcggtgaatagtcattgcttagcgaacgactagtatactttcgcaagaaaaacaaattaacacaaaatgatgtcgcttaccgtttgaatgttgtccgttcaacatatacaaactgggaagcaggacggtctgaaccagatgtatcaactctcattaaacttagtgatatatacaatgtcagcctcgataacctagttggcaggacatatcgaatgcctccacagttcgaagtcattttagatcaaatatccgatttagatacagaacctaaaaagaaagcgctcaatcttttagtcgaatatacttacttaattaaaaagtatttcatgtagctatcacacctttcattttcgcttgtaagcaattttaaattcagaaatgattaagtccatagagataatgtaacgacaaaatttacagccttttaaactcttatatttaaaatccgaagcattgacaccttagagaacattacgctctctttttacatataacccaaaaatgtaactatttggattgttgcatttgagtatatagtacatttggattttaatatagactagcggtaaaatattcttgtaaagtcagaaattagtgaatttttgactatttccattgattttatgcggttattcggaaatatgcaatattacatatccattaattgtaatgtaaaccatgttttactcgtatcaaccaactcaaggaaatgctataatccgctttgactaactgctacgaaagctcatgccattgctaacgtttgcagtttatcatccacaactagggcgactccctagattgcggtaccattccgcagcccttaacaatttgttaggggcttttttcatttctgttcgacaaaatatgacaatattataattaaatgtttgctatgataagctcggaaatcttacattttacataactggaggtaataacatgtataagaaacttggtaccttagctttaacaggcacattagctttaagcttagctgcatgtagcgaaactgaggaaactgcaaaaaaagtatctagcgaccaaaaaactgagcaaacagatactaaaaaagaagatagcaaagagtttaaagttggtgaaacgattcaactaggagactataaattaacagtttctaatgttgaaaaatcccaaggtggcgaattcgacaaacctaaagaaggacaagagtttataattgctaacttaaccatagagaatggcggaaagaaagaaatcagttacaacccattcgattttaacctgcaaaatagcgaaggtaacattgtagaccaagcgtttacaatggttaatgaagagactcaattgaattctggtaaattagctccaaacggaaaaatcactggaactattgctttcgaaacaaagaaagatgacccgaagctccaattaatcttcaaacccaattttttatctaaaaaagaagtgagaattaatctacaataattaaataggagtgtttattttgaaacgaacaactgaatttgtattaggacttattggtggtatttttggagtattaggtgctgttttagctttaatgataggtggaatgggagcagcatttgaagctgaaggagctgattctattatcgggttaggttgggctgcggtaggtctatctattttaggaattgttggatctatagtcgtgagaaataaagccaaagctggcggtatcatgatgacaatcgcagcaatcggaggatttatttgtatcttcgtattctatatcttaccaggtattttattattaatcggtggattaatgggaatcttccgtaaagataaggcttctgcatctgcataaaatgagcactcgaaagagtgcttttattatttctcaatgaataatatagataaatatggtaaaataggaattgggtagtattctattaactctctcgttattaaaattaaagtggttatcaagtcgaaggaaggcaccttagggtgtcttttctttagggaatttataaatgcttcattacgatataaagactcaaatcaatacctttaggtgtgaaataataaattcaacttgtggatatccttacttatccacaaagaagaccgtcatttatttgacggtcttctcttttactcttcttttttcaacaaagttctgctatcataaaaagagtagatatataaattgcaaatgtaaatttttcatataaattaaaaaaacaaatagaaaaaccccgacgaaattttcaaaggttgatgtaagtttgtccgcctactaaaccgatgaaaattggaaactggagatcgaggtttgtatgaacatatttaaagttgtatcgctacgtctatgatagcatatactttaaaaaatgtgaactacaatcctctattttcctatacccatttttgggcggggtggaaattggaggattttttattatgtcaaaaagcaaacgtgaccgtcgtattgatggtgaaaaagcaagtaaagatttatattttcaattgtttcagtacttattctatgaaccaaaatatagaaagctagataacaatgctcgtgtcttatattctattttacgtgatcgttacaaactatctgttcaaacttcacaaagtaaagatacatacgtggataacgaaggatatatttattgcatcgctgataacactgagctaagttatatgcttatggtatcagagccaatagctatcaaagctaaaaagcagcttcatgatgtgggcttattggacgaagaacctgtaaaagatggcgccaatcgtttgtatgtattagaaccagaattaacaactgataattggatgtataaagctgaaatagaggatctacgaaaaaagaaaaaggcaaaaaaagaggaagaaagaaaaaaacgaaaagagaaaaaagcatctgagaaagcaaaaaaagaggaagaaaaaactccacaaccagttggtgacttaaaaaacttaagtcaccaggaaaataggggttcatccgaaaacggtgacttaagaaatttaagtcacgtgactaaagaatctttagcgtatacaaaagtatttaatatacagaacgattttaattactttagtaagtatgtaggtaagagtatccctaatctcattattaatttttataatcaatatttcaaaacaactaagtacgcaaaaattgaattaactaaaatgtgtgaagaagaaaatgcagtattagtattcgaatcaattaaacgtgctattgatggagaagcagataaacctattgcatacataaagaaaactatcgctaattggaatgctgataattgcgagacattagaagatattcaaaaatacgaagaaaaacatcgtaataagaaaaatcaaaataaaactaagggcagctatactcctaaaaagaaaactgtacgtaaagaaatggttccagaatgggttggcgaggaagatactggatcatcaactatggaagacaatggacaagcttctgaagaagagcgtaaacgtttagaagacgtattaaagaaatacaaaaaagattaatgtcatataggggatgaatacgtatgccgagaaagttcaaatttactgaagaagaacaattacgatttgatcactttgttacaacagatgaatttgcagaagtattagctatcgcatggagatacggttccaaacgaaatgacagtttctcaataagaagtcaaagaaaatggattgttgctcgtttttcagagttggttgaaagaagttggtctataagatattgcgaatatggaggcgatgaaccttattgggaaggagcagtatgtttaaatcaccctttagtgaacatgctagttgaaatgggatggtcccaagttactaaagaggagcgttcttttccgataggcgattttaatgaactagtgttcgtaaagacttttattctattattacacgatttaggaacaattcgagaaaaaagaaaaggtagaatgatagtccgtccacgattacgaattcatggatcagttgatgtattaaacaatattggtcgggtcctcaacaatgaattaaatgttggatttaaaaaattgcaaagtgatcaaaaggttccaagagcaaagacagtttattttcaatctaaatttgaaatacccaagattttagaatttgttggagctgtagaatccttagataaatttaattcgcttgatctaggatctagggaattaatgagagtgtgaaatttcacacaccgtactatttttatatcttctaaaactcagtatataggggattttaaggaatattagggaggacaagcttatggcttccctacctttctacacgcattttataaatttagcgaagccattgcgaagactaacgacctcgcaaaaagtacaaaccaatggttaatcaattgtattttgttgtttttggcatattttattgaaacctagcgtaaatatctgttagaatcaaaataccaatgattaatcaatggttatgaaaggggaatgtatatgttattaggaaatccatacgcgattgacttaggaaatggctttacaaaacgcgcttcaaagaaaaataaatcactagaggcagatgttattacagaattatctgtgttggctcctgtagacgactactacaatgaagctagtttcacgaaaattgaactaacaaacactgacttcccatactacataggagaagaagctagaaaatccaaactaccattaatccgtgcccttggcgagaataaagcgaagcgctatgaggatccaacatttaagaagcaattatttggattcattgcaaaagactttaaaaagaacgttacaattccgttacttgttacaggtcttccagtatcacactttggtaatcaacgtgaatcgattcaaaaagtagctatggaagaaacagcagtaaaagtaaatggccagttaatcacaattaaagtgaaacaatgcttagttattccgcaacccgtcggcactcagtattacttagtgaagaaagaaattattaataaagaagatcgtattcttattatcgatggtgggtttggcacatttgatgttactgatatgtctggtaatgctgttattgatcgtttaggaactgaattaggctgtgagaaagcatttatggctattgaacaaatcgttcgcgataacattggtgaaacacctgatttaagcgtgtcgaacatgcactatattcttgagaatggctataagtacaacggctctctatacgatttatacactcataaagacgtagctgagaaggttgatgaagagttacaacgtcattttgatgcagcattacgtgaagtttctcaaaagttcaacttagctgtatacgataaaatcgtctggactggtggaatggctgctcttcataaaaagcgtattgagaagaaaaaagagcaattcccaacatttgcggttctagaaaacggtcaagaagctaacctattaggatactactatttaggatgtgatgtctttgacaaacttacaaaagaaaaagcttcaaattgagctaaatccaaacaatgacaaggttctgtataacttcgtaactcgattagaggaacaaggtaaaggacaaaaagggtatgtaaataaacaaattaaaaagagattagaaatgtaccaggtacttgctgaagttgcaggagaagaagatccacttcaattagttaagaagttactaatcaatataaatactcatggcatacagaatgatgcaggagtagatgaaaagccttctgaagaagtcgttgataatgctatggatttactagctaatttagataaaagctttatgtaagaaaaattttactccttcctccctcctctcaaaaacagcaggaacgatagcatgttggaattatgtccctgagaatacagaggggggaggaggttgaatttgaaaggggagagcatcatgagcaatgttaaccctatgtttagtttttctagaaaatctactacaataacaaatcaacaacctcgtaaaactcgttctgacaaaaagaaagatgtaaaaatccccgtaaatgaaatacaaagacaattaataagatcttcagcgttccaacaaaatataactactacacaatacatgtctaaattgatcacagaacatctcggaattgattatattagtgaaatacatgcgtatgaatataaggacaccaaaaagtacattcacgcaaaattggagcaaggagcgcactctaagcttgtccaattagcgattgaatggggagtttcgcaaagagcagctgcaacacgtattttatgctttgcattacgcaccatgtagggagtgagcgcatgtatagtaaatacgacgttatgacgaaagaaatacagcttatgagtgctagtaattggtgggagcgaacgaaaattgaatggaagttaaaagagaagtaccgttttgaagtgaagatgctcaaaatttacttatttcgaatgaatattattatcgaagatatggaagaggaagattacgagtgtaatgctagtgatctagctgagatacttgttgaggactttcttgaacatatacgctctaaaaatagtatggagcagctgtatcaaatcctagagagcaagaaacattatacggattttaatttggagtttaatgaaaatgacgatcgatacggtacaatttctgtaaaaattgatagacggatattaagacgaattgaagtgtttttttcggatatggctcatagtttccctatgcacggttttacagctgaaaaattaatcaatattctgatgtgtgactacatgcggttttatgctgaagaaccagggaagaaactatctttgttgaagcgaagattttcatagtgtttaaatttcctatttttgagatgtttaaaaaatgaaatctttgaccactcttgtactaagaatttaaaacaggagtgataaaatgggatggcttatttctggtaaagggagaaaatcgaagctctccaattttctggagaaaaacaaaattactcaacaggaattagcggaaagaagcggggtaagtaaatcgactattagtcgtgtatgccaaggagataaattttcgccaaccatgaaaaatgcacaaaagattataaaagcattgaagaaattaactaacaaagatgtacattatgatgacttttggatgtagctccgttaaaaacggggctatttattattagaagtaattattttgtttttggacatttttttactataaaaaaatgttagggtaaaagtgtcagtccgtcctaacaaatttttaaaaattaaaaccccttaaatacaggttataaatgagcaaaaaagtaagagtttggaccccaacttcagcgtacatattttactatcataattaatataattcatctctttatttttgttaggatggcctaacaaaagtcccctcaaaaaaagggggaatgttcgttttcctactgtatgttatgatggatttgcggttcttatttgttcaacaagccaagtagaattacctaaatcgcacactttctgaatgtagcacatccttactactcataaggtgtgctccgcctttgtataaagataaataggaggagataaacgatgcgtgatgtatatccggtcaaatattatagcaaagaaggatttgtagaacgaaaaatagagattaacgaagaagatttacagaaaatcattgaagattatttagataggcatgcagactttgattttgatgaacttgaggttgtaaataaccgtcctatgaatatttggttatacgcaaagtgtagaaagtatgtagatgaagaaaatcctgaagatgatcaagctgtacatgaagcagaattggaaatcacaggagattatgacggaaatggtatattttaaaggggtacggaaacgcttccttttttgggggtcactcacaaagtatgaatatatttaagcattgtattgggtcattgctatacatacctcgtattttataagaaaaaggatacgttatttgattaacgtacccttttttatttttttctatatttttcttgctcatagatactggctgccattccagctcggaataaaataaatgctccatgaactactaatgggactacgccaccatttgttttaacttactttacatacacataggcttcacttgctgttacatagtatgttttatttttcaaacttcacatattcaccagaaacccattggtcgccgccaacattataccaaccgtctctatatccccaagattgatatctttcactttggtacacattttttacgacaccatagttagttcctggaccagtacgaacacgtaatacatcagctgtaatagttactacaccaatgccatcatttgaaggtttagaaggagctggtgcattttctcctgtataacgaatatatgatgaatcattatatacccactgatcgccacccaagtttagccaaccatttgactcaccccatacttggtagcattctcctttacctaacttacgaataactgcatatccagttccaggtccttttcgtaaattcacgttatcgccattaatgtaagcaacttttgtaccatcgtttgaaggtggaataggagttggcattactggactacctccaccgttatatgcattttggactctttcaataaaactattccaacgtccttctgctaacatacgatgaggacaatactttccactccatgattgatgtgtgcgaactttactaattggaatattgtactgtttcatgagcccagctacgacgatagctgcattatcctccgctttataatatcgatctccaccacttagagagtaacagatttcaactccaatagatttacgatttccgttaccgccaccatcaccgcaatgccaagcgttacgctctaaaggaataccttgtacagcttctttatcgtctaccgcaatatgaaacgatacttggttatcattacgaatcatataagccacttcgttatttgctgtagcatcgttataagtattgtggacagtaatgaattctggattcattgtataagggcacttagtaccatatttgcttgcatcaactaaattttttctgatttccattattaaacatctccttttagtgtaagtcatttttttctaatacatttttttgttgtaatcctttgttgctcaaatagttgttcttccacgccatatacaaagtgaatgctcctgtaattacagcaactaaatcatttgtcattttgtcatcaatcgtttggtatcccacaagatttaagacactattaatcacagcaatcactaatacgacatagcgactaattgaagctgcatcaaagttcctcatactctcacctcctccaaataaaaaaagtgaccgtatatacgatcacttccctgcgaatttaaaaagagccattatcccaccggtgataatagccccaactactgtagtaccaatccaaaacactaacttatctaatcgatcaattcttaaatgagcacttttcgctgactgctgcgcttcaattgcaacatccttaacattaccaagtgtatctagtttggtttccactctggttaatccaactaataattctttaaagtcatcatttttttgttctgacatttattcagcctccttttatgctgcgaaataacttgggtccattccaaatatctctgcaatatcttcttcacttctatccttcagataagattcagtcgttgaaatatcagaatgattagcgagtgattttaatttttcaagtggaacaccttgtacttttaaattatctaatctgctatggcggaaacagtgaggattcattttaaattccttcccttcctttttgttcagcatcttagcaaatatatcgcaccaataattaaatacactcttgttcaatctctttctctcaccattcttatacacacgcacaaacaaatctggaatagtatccttacctcgctgatttatatataaacgaatgcatttctgcacccggtgattgtaatataatctaaacttcttaccccgttttcctcgtaccacatttgtataatattgttctgtcagcccttctttttgaacctggtatacctcattctttctagctgcactgtaataagaaagtgctaaatacgttgctaacatatatctttcttgtgctattagctcatcgattaaccactcaatttgttcttctgttataaaagtgatttctctaactggattcttaggtaaaccacgtacccgtgaacctacattaaattcataatcatagtcatcatcatccgcacaaaactctaacgcggaccttaatgcactcattaatccgttcacacgagcattagacatcctcatatcttgaaaaataatagataaatttcgaatatctttacgcgttaaatcaataagatttttatttccgaagtgttgatgtattagaaacaaaataattcgtaaatcccaaccgtattgctttaaagtgcttgccgcttttccttgtgctttcttttcaatcagaaaatctttgactaggtttttatttccttggctaacatgcttttcgtaaattgcttggtctactattcgtttcacactaatcatctcctcaaaataaagagaagcgatatcgcccctcttgatctatgatttgaatttattcaaagccgtactttgcgcaaaataaaaaacagcttatggctgctctggtttctcatttattaattgttgtactaatacctttaattcatcaatttcagctttcattgaaactttctcaagtttttctgcttcaagttgttctttaagagtgtcaacttcctgcttccacataccgtggtcaaattgaagatttttaactttaaagtcaacttcttgtattgcttgaatagaaattgcaaccgagctataaagtgttacagcgtctttttgtggtgtggtgaatacatcgtcagagtcctccgcaatcataccgtaattaattggggttgacctaacagcttgcaatcaccgtttttccttgcccccttatgggcgcacgaaatcaccataacaatatggatacctaaaattatttttatttccaccacaagtatacatcgctggattttgatcaactttcatcttagaaaactttttggctgaatcctccgagtgttgtttaacttcttgactagcaacaaaatcaatataccctggccccatattatagctttgaataattgtatccatgctaacatccttgtccgttccatatttgtacattttagcaaagtgttttaccccttgttcaatgctcaagcttgtctcttgaatttcatttggctttaatccaagtgattcggatgactgcataggatcgtttccctcacctctactctcttggtacataattcctaataaaactgctgttttctctcctaaattatatttttctaattcttttttcaaggtagattcatattgcaatacacgtttttcggtggctagcgctttatttttttgaatattggttttatgattaaaatatagcattccaagtattattcctaagcctaaaatactaataaggaacacttttataatttgttttttacttgtatccttcatatattcctcctcgtataaaaaatttaatttttcaaaggtaattggttatttacaaactatgtaatgaacatctatctcccgccctttttagactcaaacatcaatactttaaggttttaagtttaatataaaaatttaaagataaggtaaagataagataaagataagataaagggcattttttatacgtactttaaaagatattggtacaaaggggtatgtggggaaatttgttgatataaatggatttagtaataatggaaaggttaacgtacaaattattaataatggaggtatcattccagatgatttaccctatcttttcaatatgctttatataaaaactacaacataacatataataaaaaaacggcgaaccctcgacgtaggagaatccaccatcacaaataaatgattatttcacacctagtttttcttttactttcttaggaagctcatcttcctgcacttcctcccaagctgttacaccttttttatctaaatgatatacacgtaggaatgcttctttacgaagattcttttgtgcgataaattctaactctttttctttaccttccttatcaaaacccgataatgtatattcatactcctttcccatcactttaccatccatagattttgaaactcctccttttccatccatattaatttgaacgtaatattcacctttaccaatacggttgatatcacaccaaactaaaacacttgcaaatacaacttccttattttttacgtacctgtatatttttatctttttactcacttttatttttctttcttaactaacttatttaagataatctcatataaattacttaacgaattaatgctatttgcgacataaaaaaagagaggcgtctgccccctcttagaagtgaaattcaacttgctgttcttttgtaattgtctcatcccctcaggattaactgtgtcgctaaagagtaacttagctgatataatctcctcaagcttactcttaatgaatagacctacgctaccttctttcttcaccttcccatagaatttgttagcattctcatctttctcctaactaagatcttttacttttactaatttcatatgagaaatcccctccaaatgtacacactaagaatgagatttgatagaagatacttgtctacattttaacttttcctattaaaactggaatatttggtaaaatgtattaaacacgcaaataacttgatatcgtatctcatgattttaataatgattctgtttttcattgtagtaaggttgtttatctcatattgaattacctttcatttttcttacaggttcgcaatatttttgaaaagacagtttataaagccgagaattattattttttaagagatagcattgaggagtttttcatatgcactgtactatacggtactagattcccgtacagatttcatttacaattcattgtattttctttaccatttaccaagttaaaatggaacaaatttattacttagagtgtctattatgtgtatccctaaaaatatgaaaggacttattattccccaaagtaaagtgatgtaaaaaagtgtgtattgagatacttcatttaaatgttacgagtttaatactttcacgggtaaactataaaaaaagaaacaccctaaacagcaactgttcattcatataaacgctttggttctgcttagcctgttaaaattcaacttcagaagtatcggtatccaacacccgctttaattaacatcggtatttaaaataccaaaacaaaatccatatatcgttgaaagaggttgaaaattcatgtacgttttaaacaagttctttacctacaaaaagattgtacccgtcgtattactttcatgtgtaacactaatagggtgttctaatagtaatactccatctgaaccacctaagcaaacaaagcaaacaaagcaaacaaaacaaataaagcaaattaaacaagaaaatacaggtcatgattcttttgctaagcttgaaaaagaatataatgctaagcttggtatttatgctctggatacaggtacaaatcaaactattgcttatcattcaaatgatcgttttgcatttgcctctacatctaaatcattagcagcgggagctcttttacgtcagaactcaatagaagctcttgatgaagggattacgtatacgcgtgaagacctttctaattataatccaattacaaaaaagcatgtgtatacaggaatgacgttaaaagaacttgcagatgcttctgttcgatatagtgacagtacggcacataatttaattcttaaaaagttaggtggtccatccgcatttgaaaaaatcttgagagaaacgggagatacggttactaaatctgaacgatttgaacctgaattaaatgaagtacatcctggagaaacgcgcgataccagtacaccagaagcgatcgctaagacacttcaatcatttacattaggatctgcacttccaacagagaaacgtgaattattagtagattggatgaagagaaatacgactggagataagttgattcgtgcgggcgtaccaaaaggatgggaagtagctgataaaacaggcgcaggatcttatggaacaaggaatgatattgcaattatttggccaccaaataaaaaaccaattgttcttgccatcctttctaatcatgataaaaaagatgcagaatatgatgataagcttattgcagacacaactaaagtcgtattagatactttaaaagttacgaataaaaactaataaattaatagttttccgtggttaggggacatattctctaataagagtaaccatacatgaacgtcaaatgatgctaaaaaaagaaaaaacacgcagttccatttggaattgcgtgtttttattttgctaatttattttggataaccgcttgtgtcatccagtgctgattagtttgcacatggtcttttcgaacaaatgcccctatggattttgaaaaatcattatagtgaaacgcatccgttaatctaagtacatacccctcctgaatccctccaaagagtgaagtaccgttgtagcacgaacgaattaccttttcattataggggccacgatataacactggaacgtgtgcaaggcctaactttttacaccatgcaactgctgcatcccacgataaacattcatttttctcattctatattgaaaagacataaaaataggacgtcagtgctgtgtagtgaatgccatgacaagcatacacattttcaccacatatcctccagccttctggaattctatccccccatacttccttgtaacttttttacccatgttctcgatgggttatgaccacttgataacgaccttgcatgaatagcatctttataaagagatgtattttcaccatctaacttcgtacgattaattacttcctgtagtagcctttctactgtatctattttatctcatttggttttctcaatattctttacttctattttttgattgttataactggcactttcttagtatcagaaatttcactgtaaccataataaagtagaaaaaacaataaaataattgtccaaataaatataaacactttataactatacttcatatgaaaaacctcattttccctatataagtgaatgtacatacaccttataaatcctgttacataaattattggatattgcagtagtagagaatcattaagtattagaaattgttattcataaacatatccaagaaatcttcaaaaaatatcatctagacattttaacatttcataaaaatgcacagataatatttttacgtttagctaagtaatgcttattatgtaataaatccttatctctatttcaccttaatatttatatgtacaagagtctgtgtagcaactaggctgtactttaaatatgtactaaattgtgtgtgggaaaggaagcacattttatttaaagttgttactttgaaccctttaattagttggtagtcttcttcattcagacagaaaggaaatttaaagtgtgcacgtattttcaactcagactctttactacacacactcctatacacataaaacatctatacctttcgtaacattaaggaaacaaaaggaaatgatatagaaataattataatatttcgtaacaaccttgtaacacaaatgtaacacaatacatttaatcgtacaatacttttttagctaattatcaacaaagcattgttaatatcgttcaaatttaataatgttcccataaagtaatacatattgtttgtgaagtgttttttcaaaatataacgaaacctaccatgacggaggaatgttaattcaatttaagaataaatggattgatacctttctagcttttgtatcccaatcatagtatagagaggattattgttatccaataaatgtatgtgaacatatacaagctaagccttctaaataattactgtaactaaaaaaacaagtaattatacttgtttttttagtttactttccaatatcgcaacagttttatgtgctctcttttcctgtctacattattggatgcatatcttactaaagatagcttctttttttatgattctattgaagtaattaattgctgacgttctttatctctataaattttcatttcatgtttaaactcgtaatttcctacttcaaatctagcccattccttacttgtccaatatactacatctacattttcttttaagattgcagaacacacatccactaattcatctttgtaaaatggagcttcttttgctaattcaaaagcaagcacttttggatccttagttttaatttgaagttccctagaggtttgccctaaatactgccatggcgatggtattgattgaacttgggcatctcccctatcttgaaactgtgatggagaataatttgttgaagcaaatgtaggtttacttactcctattgctgttcctaaaacaatagaaccaataataagttttttaatcattttttcagcccctttaataattttggatatgcttcatttttataccacgttcacagtcatgtaaataaagataatttgacataattctgcgttttcctcgaaaaatgcatattaattacacaccttaaatttaccgaaaacaaaattgttggttaatgtaaactttcttgtcgtaagtatacaatttttgtataaaaattagtttttaaaatatttgcatacttattgataaagcttcctgccataccttattcgaagccaatttacctctacctactcacttcgcattccttgaagaaggaatcttcttgactaaaacgataaaaaagttggggatttccccaacttttttatacgtttattgtcttattaatcctgtagatgtaacccgatatgttcttttctttccgatatattcctgttttccattctcaaggttagttaaagtcgcgcgtgttttttcctttgctgcttccccttctatatgagtaaattctatataatctccctcttttacaggtactgtttgggtttcagcattttgttgtctatttcccataatttccttattgtacataacgctaccagatgagttctggactttaatacttgcatatgtgctattgaaataagaatgcggtacaccagcttctaatattcgctttaaaacttagatatatttaatatttttttcactactattattaatcaaattatagtattttgtattaaaatcttatgatttaggactaaataacttaattgatcacactatttgactcagaattgtttaccagaaaaacgttatgtaaactttctattttgtcaattagacaaaatagtttatttgctggtaccttatcattagctagaaagagcctactaaaaaaacgtagactcctttaggtatctaaacattacatatatttcaaacgtagattcctctaacgttaacacctgcccaattccagcgttgtttacaaggatatcaaatgtagtatcacctatatatttttgaagagattgatccatcattgaatacaatatattaatgccattaaaagtacttaagtctgcacgaatcgcaaatacggaaccgccatcttttttaattttatccactacactttctgcttcttcttttcttttactatagtgaacaacgactaacgcaccagcccgtgccaaatgtaaggcaatacttcgacctatccccctactagcccctgttactaatgcaattttccccttcaatttattcatctcatcatcccctggtttaaaaaaatctacttagttatatcacaagataccctttgaaatgttgctcactaatttgatatccataaaaccaaaaggcccactcataattataagagtcggccttttcacttcacatattcattagctttacatacagcatccccaactgttatgtactttgtactaagtataataaagactctaaatggtattataggtaaagccaacttaaactaaagttaattcatatacattttgcttagagtctctgcctttaaacagttcgtttaggattctatgcatatattcaataaaatttcagcaatgcctgtatttttcatctttcatatttttctttattagctatgagtatacttaaaaaactaaaaactatttgataatcttttagaatctaactttcttttaatactatttgctatttcttcaatattttcatttagaaagaaatgattaccttcaaaagaatgaaaagtacacgttttacttgtgtatcgttcccattttattacttgatcatatgtagtaaattcatcattttccccattaaatataagaaaatcaatatcacatggttgtgtatttttgtcatgaatatacgtctcaacgattttaaaatctgctcttagaatagggagaaaaatctccattaattcttctgattgcagtaccccagatggtgtacctcccattgcaataacttctcttttaaattgctcattagaaagattatgtcggatattttttattttactatttggatgatttctaccggacaaaacaagaaattcaggcgatacgtttttagaatcttttatttttctggctaattcataggcgatcaaacttcccatgctatgcccgaatagaatgtagggcgaatcatctatctgcataactattttattgtagacatcatttactgcctcttccatactttggtacaagttttcttcaattctatatcctctaccagctagctctatcgggactacctcaatatatggattaaagtgatttttccattttgcgtaactaaacgcagatcccccagcatgtggaaagcaaaaaagtttagtcttctgcattgattttctccttactttcaaatttgtatatattttggcaaattgcataaatgtctttaattattatctcttgcggaaattcatcccttgttgcacaagcagataacttataatttggatcaatgttatattgtttaaagtaaaagtttttaggtatattcttgtatgaaattaaagttcgtgattctttttttatagagaatgaatttaatggggtataaagcccttttccaatcgtttttatatagctttcttttaatgtccataaatcaaaaaaacaattaatttgttcatcagaattcatattagatatatcataaaattcatccgctgaaaaaaattcttttgctaatttaagagcctctatctctgaagtcttttctatatcaatacccacattaaaattagcagtagtacaaaccacccattctcctgaatgtgacagattaaaatgaaagtcagaaaaattttcaacaaaaggttttccatactcattatatttaaatctaatttcttcattattaattttatacttttggcagattagagatcggattagtaaatcccctatcagggtcctattaacgtcacatgagtttaataaacgcttcattcgttctttcttctcatttgaaaccaagttactaagttgcttaaacaaatgactttcaatattctttggtattttcacagcttgaatgtgtatgataaatcacttcctttttttaaagatggcttcatatatgtgcgttacataaattcaaattaactttattaaattgcaaatacaatagaaaaggtgcatatttacatatcaatgaaaatatacacctttcctcaataatatcatcaaagcattagtttctattacaaaaaatagagaggatttacatcattctatgagcaactcatataggtttctatgtctctatcaagtaaattttccattatcctcttaaaaattaatactcttgatatattcattattgcctacactttatttgcagttattggtctccccttttcattcatagcgttgcatcttttgcactctctacttttcagttaatgaaagggatgtttcttttatcccttcaaattcatttaataggtacttaactatcttttcaactgcggggaagtctactatttcctcatgtgatccagggactgaatacctatttactcttccttttaataaaggtccccaatctgtaaacaactcttttccttcctcagcactaaagtagataacttctccaaagtatggtatcaaatcattctctgccattaagttcaggcatttcctatgagcattgataacttgcttcaaattcataagatttgcatcaggcgggagtactccttccataattaatcgctccacaagcatatcttgcttatgaacgagcccttcttcctgctcagtaagatctctaggaatgaaatgttcagatatatatgagagcatatcctcccttgttttacgatcttgctctgaaggtactttagtatccattagtatcaacaactcaacttcctcaccttgattctttagcacagttgcgatttcataagcaattgcaccgcctaaagaccatcctccaagacgatatgggccttctggctgaacacgtttgatttcttcaatgtaaagttgaattagttccggcaaggtcaattcatcaatttcttccttttctataagaggattctgtaaaccataaaatgaacaatggttcttaagtaatcttgctagttgaatgtaacagaatacattccccataaacggatgaacacagaagaaagggcttttttctgattcttgtagtggaactagcgctgctactgatttcgtcatatcatgcttatcacgaataaggcatgcgattccttccaatgttggattcttaatcaatgttgaaaccttaatctcttttccaaacttctccctaatttttgaaactaatttaattacaaggagagagtgtcctcctctattaaagaaatcatcatttacatagacatcttctatctgtaacacatcctgccagattttaatcaactgatattcaatttcatcccttggaatgattggtgtagagaagttattttctctatgaatagttaaattgttcaatgcctttcgatcaactttgccattcgttgtaagaggaatctcgtctaccttaataaagtgtgcgggaaccatataatttggtacttgtgtcttgagatactcacgccactcatgcatactaccatctccaactacataagcaaccaatctctgctctcctaatttatcctctgttgccaaaactactgcttcttttaccaatggatgcctctctatactcgcttcaatctcttcaagttcaatacgaaagcccctaattttcacttgattatcaattcttctcaagtaatctaaattaccatcaggtaaataacgaaccaaatctcccgtacgatataaacgctcttcttcattaaatggatgacagatgaatcgctctgctgttaattctgggcgattcaagtattctctcgctatacctgcacccccaatatatagctcacctgttacaccaactggaacaggtaacaaatttttatccaatacataagtttgaacgttcggcaatggacgtccaattgttactctcttactatcttttttgatatgatagcatgttgcatcaaccgtacattctgtaggaccgtatacgttataaaaatcaatcttttcagtctctactagctgttcccataatgacggcatgattgcttcaccaccgaccaatatcttgcttggtacatgaacatcagcacttatttctagcaatcctccatctattagtaattgaagtaatgaaggtgtcatatcaaacatttccaatttattctccctaatataggacacaaattgttctgggttagtgcgaacttcacttggaataatatataaacttgaaccataaagcagcatttgtaattgctgaatagatacatcaaaggcaattgatgcattcaaaccgacgcgcatattactaggtatctcatgtgagaaaacttctttttgtaaaccatatgataggtttattacagaatggtgctgtactaaagctccctttggattccctgtcgaaccagaagtgtagataacatacgctaagttttcccctgttacctcacatattggtgaaagtttgctttcttgagaaagcattgcttggtccctatctaggcaaactgtcttaatgtctttaggaatccagcctagtaatacttcatttgtaactaacactttaattcctgtgtcttctaaaatatattgtaggcggctttccggattcgatggatctaatggaacataggctgctccagccttccaaattcccatgagaccaacaaccatctcaactgaacgctcaaagcaaaggccaactaatgactctgtcccaattccacatttctgtaaatgatgggctaattgattagctctttcattcagctctcgatatgttagttgctgtttttcatctaccactgccaacgcgtcaggcgtacgatttacttgctcttcgaatagttgatgaattgcattctcacgtggataggatatagtattattattccattcttccaatagctttctttgttcagcttccgtaatatatactagctccgatagattttgatcaatgtttttgagcatttgcattaacactttgtgtaaatgacccagcattcgttcaatggttactctattaaacttactacggtcatacattaactttaacgataactggattcctggaactacagctaaccctaatgggtagtgggtttgttctaccccttccaattcaccaatttccagattttctgaagactcctctttcactggataattttcaaacacatataaactattgaacagcggtattcctctaggaacttcactccacccctgaatctctgtcaaagaagcatactcatattgtcttctttctatctctccctcttgtatcttctgcaaccaatctattaattttatatcatccatcaattgaattcgcgtcggtgacgttgtaatgaaaggacctacgatgttttcaacatcaataatctccgtagaacgtcctgagcttgttacaccaaaaacaatgtcattttctccactatatcggctcatgagatatgcccatgcaccttgaattactgtactcaaagtaagtttattgcgtttcgcccatccttgtaacgcttgagtctgctcttctgataaatacgtaaccttctctgtgtaacctttttcttcctctttactttctaagcccagcaaagttggcgcagtaaaaccttttagcttctctctccagaattgttccgcctgctccttatcttgctctcttaaccattggatatatttcttatatggtgaggacttaggtaacttcacagcttctccattcattctcttctgatagactgtaagtaattcattaaatactaatggtaaactccatccatccagtaaaatatggtgatgggtccaaacaatccgatattcttcctcaccttcttgaatgactgttacccgcatcaatggtgcttcatcaaattggaaggcttgttttcgatctaatgccaaaaagacttttcttttttcctctatctcttcacttgtcattgtacgccagtcttctttattcactttaaatgggatattttcatacaccacttgtacaggttcttcaatttcgtcccatacaaatcctgtacgaaaaatttcatgccgctgaattacagatttccacgcctgctcaaatgtaggaatattcatttttcctcgaatcataaaactcaattgcactatatacggtgcaacatgttcatccccttggtcatgcaatgtgtggaaaatcataccttcttgcaaaggtgatagtggatataaatcagtaatctgattgttctttccgcgatgcattttgtttagtacatttgtcaaaccttcttggctaagattagccattgcaaaatccgaaatggtcagtgcagattctctatctgaaaattgaatcaatgtactcagttgatatagcatattctgtgcaatactttgaatcgttgatttggaaaattgtccaacattgtatacccaagtgaactgaagttttccatccgttacaaccccaattacatcaattacatgcgatcgcttggaaccggcagcatgatctaaacgcttaaattcgttctccggaataaacattgcatcgctagaaaacatttggtcaaattgtccaagatagttaaaactaatagacggtgtatattgggagcttaattgctcacacattgttgcgttcatgtaacgcaacaccccataatcaacacccttattaggaattttgcgaacttgttctttaactgcttttaatgcttcaattggcgtattagcactagtaatatttaaatgaactgggtaaatacttgtaaaccatcccacagttctcgataaatcaacatcttcaataatctcttctcgaccatgtccctctaaatctacgctcaatatcggctgccccgtacatgctgccgtagcttgtactaatgctgctaataatacttcattgatttggacacggtgagtgcttaaagtctcttgcaataacatacgggtctcattctcatttaacaccacagtaatttcctcagttactgcgcttactggattacttatagtaccatctaccggcaatttaactacgtcttgttcagcctgctcctcccagtaatgtagcacttcttttgataggccagtttcagcgtaatgatgtaatttctccgaccattctttaaaagatgtactcttcataggtaattgaattttctgcccttggactacttgcgtatatgctgtttgcaaatcttccaataaaattcgccaagaaacaccatccacggctaaatgatgaattgtccaaaataatcggccagcgtgctcaccttcatcaaaatacaccattctcattagcggaccatcatgtaaattcaaactttcttgtgcaatattaatctctttttgaataacctgatgccaattagcttccggcacttcgtctaatgaaatgacagtaagcatcaattgttcttctattccttcattccactgtttccaaaccccattaggtaaacgttcatatcttaaacgcagagcatcatgatgaagtagaaggttacctgccgccttttccagtgatcctatgtccaatttctctttcgttctaaagaacatggattgattccaatgatgtgggttaggatgattttgtgcaaaaaacctttgctgaataggtgtaagtatcgtctctccagttataattccctgttcagcttgtacaccttgttcttctttgactacttgcgccaactcagcaattgtttggtgttcaaatatttgttttggtgtcaattgtaaaccaacttgcttcgcgcgcgagacaatctgaatgctaagaattgaatctccaccaatttcaaagaagttatcattcataccaatacgttttgaacctagcacacgttcccaaatgatagaaagcttatgttcacgttcatttcttggggccacgtatccttcttgtgttccttgataatctggtataggtaacgatttccgatcaatctttccatttatggttagcggtaattctttcatttcgacaaagtaggaaggtatcatatggattggcagttttgttttaagatactctcgccattcttctaaactgccttcgcccactacataagctaccagcctcttatctcccgactgattttccctaaccattacaactgcctcttttactaagtcatgctcttgtaaagtcgactcaatctctccaagttcaattcgaaatcctctaatcttcacttgattatccattcttcctaagtagtctatattaccatcaggaagatatctcacaagatcacctgttctatataacctctcgccttctttgaatggatgagaaataaatcgttcggatgttaactctggacgattcaagtacccccttgctagacctgctcctccgatataaagttcccccattacaccaactggaactggcaacctatttctatctaatacataagtttggatgttaggcaatggacgtccaattgttactctcttactatctttcttgatatgatagcatgttgcatcaaccgtacattctgtaggaccatatacattataaaactggattttatcagtctctactagctgttcccataatgacggcataattgcttcaccaccaaccagtaccttacttggaacatgaacgccatcgcacgtttctaacaatccgacatctataagtaattgaagcaatgaaggtgttatatcaaagatttctaacttgttctccctaatataagctacaaactgctccggatcacttcgtacttcgcttggaataatatacaaacttgaaccataaagcagcatttgtaattgctgaatagatgcatcaaaggcaattgacgcatttaaaccgacatgcatgttagatggtatctcatcttcgaaaacctctttttgtaaaccatgcgacaagtttattacagaatgatgctgtatcaagacaccctttgggttccctgtcgatcccgaagtatagataacatacgctaggttttctcctgttacttcacattttggtgaaagaatgctttcttgcgaaatcattgtttgatccctatctagacaaactatcttgatttctttaggtatccaatctttcaatgactcgttcgtaactaatacttgaattccagtgtcctccaaaatatatcgtaggcgactttctggatatgatgggtctaatggaacataggctgctccagccttccaaatccccataatactaacaaccatctcaattgaacgctcaaagcaaagtccaaccaatgattcattcccaattccgcattgctgaagatagtgggccaattgattagctttttcattcagctctcgatacgttaactgctgtttttcatctaccactgctaccgcatcaggtgtacgatttacttgctcttcaaacagctgatgaattgtactttcctgtggatatgctacagcaccattattccactcttccaactgtttttgctgtaatcctgataatataggcaacttagctaatgatttatcaggattctccacgattacattcaaccagttcccaaaatgttcagccatggattcaatagttaagctgtcaaataaatcagttctataaacaaaagtaagtaataaaccctcttccacttctgcagcagttaaacttaaatcaaacttagcgatcggagcattactttccattacttctatatttcttccatgtaattctggtagcttctgtcccgtattttgcaaagtaaacatggtttgaaaaatcggagaatggcttgtatttcgttcaggttggataacctctacaattttctcaaacggaacatcttgatactcatacgccttcaatgcttttatccgtacttgagataacaactcttgaaatgccggtgcattacttaaatcagctcgataaaccaaagtgttgacaaagaaaccaatcagcccctcaatttctcgataatttcgatttgcaattgggctaccaacaataatatccgtttgtcccgtataacgagcaaggaaactttgatacgatgccaataaggtcatgaaaagtgtggccccttcttgacgacttagttcgtttaatttatccagtaatgagcgtgacaacaaaacattatgagttaatccatgatgggtttgcactggcggacgcggacgatccattggcaacattaagactggtaactcaccagataattcttccttccaatatgcaagctgttgatatagtacttcatctttcaaccagtctctttgccactgagcaaaatcggcatattgaactggtagtggttccagctctgcttgtttttcaccaatcgcattctcataaaatgccatccattcttgaagcaagatttccatcgaccacccatccgagataatatgatgcatattacacagaagaacccattcttcttctgaaattcttatgagtttcccacggaataatggcccttgttctaaatcaaatggagattcgacttcagtttgaatccattgctccagctttctttctcgctcctctaatgaaagcttagttaagtccatttgcagaagcggacggaaaacgtacggttgaatctgctgcacaggatggccatcctcttcataaaatacagtccgcaaagattcatgacgctctatcaactgattccatcccaattccaatgcttcaggtaaccaattccctgtaaggcggcatgccattggcatattataaagggcactattaggtgcaaattgatcaataaaccataagcgctgttgggcataagatagtggaatattatttccacgttccatcggcaccaatggtggaatttctcgtttttcattccccttacgtaactgatccattcgtttcgctaatgcctcgatcgttgaatattcgaacagttcacgtactggcaatttgatttgaaagacttcctgtaagcgcgagaccacttgtgtagcaagtagagagtgaccaccaagctcaaagaaagaatcctgaacaccaatgtctcctattcctagcacttgactccacactgaagcgataagttcttccagcggagttcttgggtatacagtattttcagcggattgttcactaagtataggcaatgccttcaaatcaagttttccattcggtgtaagtggtaaaaattccatctcaataaagtttgttggaaccatgtaatttggtaaatgtgtttgtagatgttctcgccattcatggacacttccttcaccaactacataagctactaatctcttatcaccttgattatcctctcgtaccaatacaactgcttctttcacagaagaatgtgcctgcaaaacagcttctatttctcccaattcaatccggaaaccacgaatttttacttggtcatctatacgtccatggaactggagattaccatcagaaagataacttgctttgtctcctgtataatagagacgttctcctgacttgaaaggatgtggaataaatttttcctttgtaagatccggacgattagcatatccacgtgcaagactcttccctccaatatagagatctccaattacgccaattggtactagctgaagatgagaatctaacacataaacttctgtatttgcaatcggtcgaccaatcgatggcgtacctgttgtcactcctacaggtacataacaatctgtggtaacaacggtattttccgatggaccatactgattaattaccgcaaaaggaatatcgttagatgggtactgcgttaattgatccccaccagtaatgataaaacgaagatccgttttatctggccaagataatttcaagagcctttccagaataggcgtaggtgcaaagctagctgttattcgtgaatcaatgagccagtcccttagtgcttctggattaattctcagttcctctgttgacaagtagagtgctgcgccagcagttagatacggccaaatctcctgcacagccgaatcaaaagcaacccctgcaatctgagtcgcacgatcctctgctgaaatatgataaacttcctgatgccaagaaaccatattcattaatgagcgatattcaaccatgacacccttcggttttcctgtagaaccagaggtataaacaatataggctaagttctctggatttatttgacgtgtaggtgcgattacgctttccaccgttaattcttctaacctcaccatttcgacgtgtgcgaaatggccttcttgtccttccgccgtcactacaaattgaatccctgcatcttcaatcatgtattctaaccttgattttggatacaacggatctaaaacgacataagctccaccagcttttaaaatgcctagtaaacttaccattagctcagctgacctcggaagataaacccctaccactgactctggggctactccctttcgctgtaaaacatttgccaactgatttgcttgtgtatccagttcaccataagtccactgttttgtttgatcaactatcgcaatcgcatcaggacgccttgctacttgctcctcaaatttgtcgcaaataagaccctgatgagacatttctattacagtgtcattccatgtttctaataacaaagtacgctcgggttctgatagcatgctcagatcatgcaacggattttgtgggcgatgagaaacttcatgtagccatttctcaaagtgtcctgccatccgttcaatagtagtagcattgaataaatccttattgtactcaaaagtaaaaagtaatccctcttccgtctcaactgccattacacttaaatcaaactttgcaattggactatggctttctatcatttcaatacttctactagataacaccggtaacccttgtttcatattttgcaagatgaacatagtctggaaaattggcgaatgacttgtacttcgctccggttgcacaacttctacaattttttcaaatggaatatcttgatattcatacgccttcaatgccttttgacgaacctgatacagtacatcttgaaatgtcggtctaccactcaaattagctcgataaaccagcgtgttaacgaagaaaccaattagtccttcaatttctctataattccgattcgcaattgggcttccgaccagaatatcttcttgtcccgtataacgagatagaaagctttgatatgcagctaaaagcgtcatgaagagcgtagccccttcttttcgactaagttcattcaatttatcatgtagcgtgcttggcagaaccatagtgtatgtcgacccgtgatgagtttgtattgcgggacgcgggcgatccacaggaagttggagtacaggaagctccccagacaattcttccctccaatattggagttgttgatcaagcacctcctcctttaaccatcctttttgccactgagcaaagtcggcatattgaaccggtaatggttcaagttccgctacctttccatccgttgctttctcataaaatgccatccattcttcaagtaggattcccattgaccatccatctgaaatgatatgatgtagagtacaaaggagtatccattcttcctctcccacgtgcaaaatacttgtcctgattaatggaccctctgttaaatcaaatggtacttctgtttcttgttgaattaaacgtttaacttcttcttcttgatcttcagaagaaagcatagttaaatccgttttcggaattgattgaaaagcatacggttcaatttgctgtacgggttgactattcacctcttgaaagaccgtccgcagtgattcatgacgttctattagttgattccatcccgtttccaatgcttcaagtagccaattccctgtaagacggcataccattggcatattgtaaagggcactattaggtgtaaattgatcaataaaccataaacgttgttgggcataagatagtggaatagcatctcctcgtttcattggtattagtggcggaatctctcgttttttatctcctttacgtaactgttctaatcgctttgccagtgactccaccgttgtatattcaaatagttcacgtactggtaattcgatttgaaaaattctctgtaaacgtgacactacttgagtagctagtagtgaatgaccaccgatttcaaaaaaggaatcctgaacactaatattttttattcctaacacttggctccaaacggaaacgatgagctcctccactggtgttcgtgatgaagtaatatcttcacttatgaactgttcttctaattccaataatgctttccgattcactttaccatttggagtgagtggcataccttcaatttggaaaaagtatgccggaaccatataatgtggtaattgcttcttgagatattcacgccattctccagcatccccttcacccactacataagctactaactgcttatctcctggtcgttcttcctttaccaacacgactgcctcttttacagatgcgtgatcatgtaaagctgcttcaatttctcccaattcaattcggaatcctctaattttaacttggttatctattcttccaatatattctaagttacgatcattcatatatctcaccaagtcacccgttcgatataatcgttccccgtccttaaaaggatgcggaataaaacgttcagcagttaaatccggtcgattgaagtagccacgtgccaatcctactcctccaaggtaaagttcccctgccacaccaatcgggaccacttgttgatattgatctaacacatacaactctgtattatcaatcggacgaccaatcggaataagcattgcttctttttctaaatcacaatcgtaataagtcacatccacagtcgcttcagtaggaccatacaagttaattaactttgtttgctgaacattgtaaaagatccccttaaaccggcgaacctgctcagtgtttaacgcttctccactagtaaaaacttgaattaaagacgatacatcccttttcgaattatatagttccatataatctaagaaagtagataacatcgacggaacaaagtgcatggtggacacgcgatatcgttcaatatactcctcaatcaccgcaggatctttctctcctcctggtggaagtaaacaaacacgtgctcctacaaatgaccaccaaaataattcccatacagaaacatcaaatgaaaacggtgtcttttgtaggattgtatcctcctcggacaatgggtattttctctgcatccactgtaggcggttgataacggaatgatgttcaatcattaccccctttggatttcccgtcgaacccgaagtgtatataatataggctaagttatttgctgttactccacttaccggagctaaattactctctttagaaatcatcacttgatcccggtctaaacaaattgcttgaatatctttaggtaaccagtcctgtagtgcctcttttgttaacagcgcttgaatttgtgaattctccaaaatatatctcaggcggttttcaggataacttgggtccagtgggacataagccccacctgccttcaaaatcccaaagagaccgataatcatatcaggagaacgttcaatacatataccaaccaatgattcaggtccgatacctcgtttttgtagaaaatgtgccaattgattcgatttttcatttagttcttgatacgttagctttccaccctcataaactaccgccactgcatcaggcgtccgtgcaacttgctgctcaaatagctcatgaatcatacaatcatgaccataaactacgtccgtatcattccattcttctaggagttgattttgctcagtatccgatagcattgacagctttgtatatgattcatctggatgatacgtgatttcatttagccagttctcaaaatgtcctgccatacgtgcaatggtactactatcaaataaatccgtgttgtattcaaatgagacgaatagaccttcttccacttcataggcagttaagctcaaatcaaatttagcaatagacatattactttctaccatttcaatacttctatcaggcaaatctagtcgttcttgttttatattctgtagcgtaaacatggtctgaaatataggggaatgactcatgcttcgttcaggttgcacagcttctaccactttttcaaatggtatatcttgatattcgtaagcttttaacgcctttttctttgtttggttcaaaatctcccgaaaagtaggggtgccactcaaatctgatcgataaaccaacgtattaacaaagaaaccaattaatccttctactcccttatggttccgatttgcaatcgggctaccaactagaatatctttttgtcccgtataacgagcaagaaagctctggtatgcggccattaaagtcataaataaagtagatccttcttgtcgacttatatccttcaattgactgagcaatttataaggaaaaatcacatgatgcgcagccccagagtaagtctgcttaaccggtcgaggtcgatccactggcagttgtaagataggaagctcaccagacaattcttcctgccaatacgtaagctgacgatttagcacatcaccttgcaaccaccccttttgccacttcgcaaagtctgcatattgaatagataatgaacttaatttagcaggatttccgcccgtttcttcttcatagaaagcaaggaattcattcatgaatataccaatggaccaagcatcagaaataatatgatgcatcgtacacagtaataaccattcatccttctctaattgaacaagctgattacgaattaaaggaccattcattaaatcaaatggttcttgcgcttctctcgcaattaaactatctacctctttttcttttacttctagaggaagttgagagtaatcccttacaggtaatgctctaggaaggaattcgacaatttgttgcacaggctgttctcctatttctttaaaaacagttcgtaatgattcatgacgttcaatgagtcgattgaatcccttctctaatgcttcaggtatccaatttccttttagatgccatacggttggaatattatataaagaactgtttgggttaaatctgtccataaaccacaaacgttgttgtgcataagacaacgggagtgcttctttattctcctttttttgcatttgcttctgaagccatgctctcttctcaggagaaagtgaactcagctttgcaagtaaatcacttctcatttttttaccccttcctcaatcaaattactctcaaatatcccttgtgcttcttcctctgataactcttctaattgcttaagcagttccagtaattcttcatcattactcacttctgcttctttttgaatataatcttgaaggcttatattctccttactatcattctgcatttcttgatttttgttatcgagcaattgatcaatctgttctgccaattgctgcaccgtatgaaacataaataaatcatgcaatgatatctcgattccaaaagcctctttaagattggaaacagcttgcgtagcaagtaatgaatgtccaccaatttcaaaaaacgaatcttgaattccgatgttttccatgcctaaaacttcatgccatatcgaaacaattgttttttccgtagacgtacgaggagcaatataacaactcgctatctcctgcttctctggtgctggtaaagccttcctatcaatttttccattaggagtgagtggaaatgcatttaatccaacaaaataggatggaatcatataatttggtagttggtccttgagataatcacgccacttttgagcacccccgtctcctacaacataggcaatcaaacgtggatcgccaggataatcttcccgcaccatcacaatagcttcgttaactaatgtatgcttttgtaataccgcttcgatttctcctagttcaatccggaacccacgaattttcacctgatgatcaattcgtccaacatactccaaatttccatccggcaaataccttactagatctccagtccggtatactcgctcgtcttctttaaacggatgcggtataaatcgatttttcgttaagtcagggcgttttaaatatccacgtgctaaccctgatccaccaatgtacaactcaccaactacaccaattggaaccattttttgttcagcactcaatacatatacttctgtattgaagattggtttaccaattggtggtaccctatgcatgacacccttttctaattccatatacgtggaatacgtagtatcttcagacggtccatataagttgaacaccttctcaatcgtacttctctcgtataaatcttgaacaagcggatatggtaacggttctccagccaaattcattacctttactgaagaaggaattgtttttgctcgaaccagttcctttgctgccgatggcacagtattaaccaaagtcacacctttggtagacaacttgtctagatgtagagcattttcagcgacaatcaccttaccacccatcgttaagggaacaaatacttcaaaaacagataaatcaaaagatagtgaagttgaagctaatactcccgctaattcctttcgagaatacgtatgatgcgcccaatgaatcattgttactgtattcctgtgctcaatcattactccctttggatttcccgtggaacctgaagtatagataatataggctaagttatcacccgtcacttcactcgtgcataccgtagtaacttcttgttctatttctgctcgattacgatcaatacaaatgacgttaacgaatgtaggtataaccattttttgttgtaacttttcctgtgtcaccagtacctttatttgagcatcttctaaaatgtactgcagtcgactttccggatacgctggatcaattgggacatatgctcctcccgccttcataattcctaagagaccgacaatcatctcggatgaacgtgtaacgcaaatcccaaccaatgtttcgcatgttacaccatttttttgtaaataatgtgccaactgattcgagcgttcgtccaactctcgatatgttagttcttcatcttcgcacactactgcaattgcttctggtgtttttttcacttgttcttcaaacattgtatgaatcgtactatcttctatatctataacggctgattcattccattcctctagtagttgcttatattccactttcgataacatattcaattctgataataaacattttggataagaggcaatttgatttaaccaatgttcaaaatgatttaccatacgtttaatggttgtatcattaaacaaatcagtattatattcaaaggttagtgataatccttcttccgtctcagaagcaaataaactcaaatcaaatttggcaacagaaacatagctttccatgagttccatttgtctttcggatagctgaagaaactcttgtttcgtattctgtaaagtaaacatagtttggaatattggtgaatgacttgtattccgttcaggttttacggattctaccactttctcaaatgggatgtcctgatactcgtatgcttttagtgctttttttcttatctgcgacaatagttcttggaacgtcggatttccactgaaatcagctcgataaactaacgtatttgcaaagaatcctattaatccctcaatctctttcacatttcgattagcgatggggcttccaactataatgtcgtcctgtcctgtataacgagaaaggaagctttgatacgctgccatcaatgtcataaataaagtgcatccttcttgcaaacttaaatctttgagcttttcctgtaaggaattcgccactattaaggactgacttgcaccacgatgggtttgaactgcaggtcgaggacgatccatcggtaattgtaaaaccggtagttccccagataattcttccttccaatattgaagatgctgattcaaactctcctctttttgccattccttctgccacatgacaaaatctgcatattggatagataactccttcaattccactggttttccggttagtgctccttcataaaaagccatccattcttcaagtaagattcccattgaccatccatctgaaataatatgatgcatcgtacaaatgagaacccattcttccctgtccactttcaatattcgtgttcgaatcagaggaccttgtccaaaatgaaatggttcctccgcctcgttttgaataaggcgtttcatttctctttccctatcttccaaagaaagatctgttagattcgtttgaggaatatgcctgaacacatgagattgaacctgttgaaaaggttcaccctcttgttctagaattgtcgtccttaatgattcatgacgctccaacaattgattccatccgacctccaatgcttcaattgaccatttacctgttaagcgacacgctgcatgaatattgtacatagcactatttggcattaattgatcaataaaccatagacgtttctgcgcataggaaagtgggataacttcttctcgtttcataggtacaagaggagcaacctctcgttttttatcttcttttcgtaactgatccactcgtttcgccaatgcttccactgtatcgtgcttgaaaagttcacgtaatggaattttaatttggaacatttcttgcaatctagagacaatttgagtagcaagtagtgagtgcccaccacgttcaaagaaggaatcctgaatgccaatattttctgttcctaacacttgactccaaaccgaggcaataagctcttccgatggcgtccgaggtagcacatttaaatcttcaatagcttgctcatcaggtgctggcaaggcctttcggtcaattttcccatttggagtaagcgggaagtgttctaaatctataaagtgcgctggaatcatatgatttggtaattgtttttgtaaatactctctccactcctcggtatttccatcgcttattacatatgcaaccaatcgttgatcacctggacgatcttctctaactaatacgacagcctctttaataaacgaacatttttctaaagtcgcttcaatttctcctaattcaatcctaaaaccacgcattttgacttggtggtccattctacctataaattctaaattcccatcagttaaatatcttactgaatctcctgttcgatatagtcgttccccaaatcgatatggatgcgaaacgaatttttcagcagtaagattcggacgatttaagtatccacgtgctaaaccagcaccaccaatatataactcaccctcaattcctattgattgcaagcgttgattttggtctaatacatataattgcgtgttctgtattggctgcccaatagaaacaaattcttgattaggctgaatatcaaatgcattcacataaatagtggcttcagttggcccataaaagttggttaatttcacttgtccactataattccatttctgttgaaatcgtctaaccaaccctgaacttagttcttctccaccagaaaatacatggcgtacggacgaacaattcatattcaattcaatatgattgaagtggtctaagaaaacagataacatcgaaggtacaaattgaactatagtaacctgatgttgtttaatcacttcagctataatagaaggatctttttctccacctggaggtaggaaagatacacttgcaccaacgtgaatgccccaaaacaattcccaaacagagacatcaaatgagaatggcgttttctgcaagaccacatccttttcagaaagcggatatttatgttgcatccattctagataattaattactgaatgatgctcaatcattactccctttggattccctgtagatcctgaagtatacataacatacgctaaattttctcctgttacaccacttatacatggggttgattcttctttttcaattgcagtgtaatctttattcatacaaatcgtttctatattttcagatacaaacaaatttttagaattctcttccgtcactagtacttcgattccagcatcctctaatatatatcgaagtcgactctctggataagtagggtcaagtggaacatacgctgctcctgattttagaatacctaataacgctatcatcatttgtaatgaacgttccatatataccccaactagaaactctgggcctacaccatgcttttgtagataatgagctagctgatttgcacgcttctccaactctttataggtaatttgttcattttcgtaactagccgcgattgcttccggtgtttttttaacttgctcctcaaacatcgtatgaatcatgccttcagccgaataattaaattgagtatgattccattcctctagtaactgtatctgttcttcttctgttaaatgagtaatttcaaatagttttgaatctaggctcttcgtcatctgaattaatatttgcaataagtgattctgaatcagatttattgtttcttcattaaaatagcttcgatcatacatcaactttaaagtaattttcttaccgggcattacaatgagtgttaaaggataatttgtttgttccgtgcttgtaacatctagtaatcttaaatcatcatttctctcaccttgaattggataattttcaaacacatacaaggtatggaataaggagctatttcgcggaacctcactccagccttgaatatctatcaacgaattatactcatactgtcttcgttccatttctttcatttgtattttacgaagccaatctactactgatgtattatccgttaatcgaattctggtaggtaatgtgttaataaatagccccaccatattctctgctcccattaaatcagtaggacgtccagcgctagttacgccaaatacgacgtcactgtcaccgctatacctactcatcaaataagcccatgcaccttgtactaacgtattcaacgttaatcgactatttcgtacccactcttgtaacttctcagtaagtttctcagatacttgataaacacactctccatagcccttctcttgtccttgatcctttctttccattgctaatggcgtaggtgcatagaacccttttaattcttctttccaaaattcctctgcttgactttgatcttgtttatttatccactggatatattttttataaggaagagatttaggaagagtcaataattctccctttatcatcttgagataaacttccatcacttcactaaagaccaatgacacactccatccatctagcaaaatatgatgatgtgtccaaataattctcgtttcctcttttgcttctttgatcgcagtgactctcatcaatggtgcttcatccaataaaaatccttttctacgatctacattcaaaaactgttgtaatttcttcaccctttcctcatgtggataggtgctccaatcctcttgatgaatagtaaaaggaagacgttggtaaaccgcttgtagtggcttttctacttcctcccatacaaatactgaacgtaaaacctcatgtcgattaataacatattcccaagccttttcaaaagtatcaacatccaattgccccccgagcaagaaacctacttgtacaatataggaaaaagaatgttcatcatcttgatcgtataaagtatgaaacagtattcctttttgcaaaggtgataaaccatatatatcaataacgtctcccatttttacaccctcttctttgttaatttaagtaatactttgctcaagctttcttccgtaagatcctctgcatcagcaaaatctgataccgtaaaagcagactctgttgttggtttatttataagttgacgaagatgcctcaacataccatctgctatcacttgaatttttaatttagaaaactgtttcctactatacatccaaataaaatgtaacttttcatctttcaccattccgataacatcaattagatgagatggtttggaatctggagcatgatctaaaaatgtaaatcctgtctcttgcataaacaaagagtcccttgaaaacacctgatcaaattggcccaaatagttaaagcttattgaaggcttttgctgataaaacggaagtaatcctttattcaagtaacgtaaaatgccatagtcaactccgcgatttgggattcgacgcaattgctctttgactgcctttaacccttcaataggtgtctgagttccttgaaaattgagatgaacgggataaatactcgtgaaccagcccactgtccttgataaatcaataccttcaatcatctcttctctcccgtgtccttctagatgaatagaaacggtttgctgatttgtacaatcgacgatagcttgtcctaatgccgttaatagtacctcatcaatccttgtcttatgagtgactagaacttcgtgaaacaatgcttgtgtttcttctattcctaaagtcctcgtcacttgatcaatcgattcttctgtcgtttcttgtattggatagtccattggaattttcatcgtttctttttctacttgttcattccaataatcctttacttcttttgaaatacccgaatcactgtatgtctgaagtcgttcagaccattctttaaaagatgtacttttcgcaggtaagcgaatttcttgaccttgtttcatctggttatataccacctgtaaatcttccaatagaatcctccatgacactccatctactactaaatgatgtatcacccagaatattcgatcattttcagtcaagttatcttcaaagtacactactttcattaacggaccagtaattaaattgaaactagcttgatgaatattcatctcttcttgtattattttattccactctttttcattaacttgattccgttttacaacatggagtactgacagctcatcagtcccttcatttctctgtctccacgttccgtttggtaactgttcgtaccggaaacgtaaagcatcatgatgtttcagtaaatttaatatcgctccctctagtaatttcacatccaatctttcttttactcttaaaagcattgattgattccaatgctctgtatgtggatgttcttgctcgaagaaccagcactgaattggagtaagaggcacatcacctatcacaattccctgctccgcttgtactccctgcgtttctatagccacttgtgccagctcagcgatagttgggcattcaaacatttgctttggagtcagttttaaccccacttgacttgcttgagatatgatttgaatactgagaatcgagtcgccaccaatttcaaagaaattatcatagattcccacctttttaacacctaatactctcttccaaatggtagttagtatttgttcgttactattccgagggccaacacattcactattaatctgcttttcctccggcataggtaaggcctcacgatcaactttaccgttagttgtaagtggaatagcttccatcgccacaaatcccgaaggaaccatataacttggtagtttcgctttaagatattctctccacgcatctacatttccatctcctacaacatatgctactaatcgtttatcgcctggctgatcttctcttacaattacaactgcctcttttacatatgcatatgtatgtaaagtagactcaatttccccaatctcaattcggaaaccacgtattttaacctgatgatcaattcttccatgataatctagattcccatctggcaaatacctcgctaagtctcctgtccggtataatcttgctttcagatcactactaaatggatgagatataaaacgctctgctgttaattcaggtctatttaaatacccacgtgcaagccctgccccgccaatataaagttcaccatcaacacctataggaacaggttgttgataagcgtctagtatatacacttctaaatcgggaatccgctttccaatattacttcttgaaacatgctgcacatcatctaaagtaattggataatatgtaacatgaactgtagtttctgtaattccatacatattaattaactgtggttttttctccccatacctttgaaaccacggtaacaagctagtaggttctaacgcttctccgccaaatatgacataacgcagctgcaaatttttattcttatcttcttgttcacacacttgtattaattgtcgaaatgcggaaggtgtctgatttagaactgtgacttcttcctccaccaataattgataaaaatccttaggtgatcgactaatccagtacggaacaacaactaattttccaccatataataacgctccccaaatttcccatactgagaaatcaaatgcatacgaatgaaaaagcgtccaagtatctttttcattaaactgataccaacaatccgtcgatttaaataaccgaatgacattgtgatgttctatcataacgccctttggatttcccgttgatcccgaagtatagattacatatgccagatttttgggaccgacactagaaaccggcaaagtcttactttctttcccaatctcatcttgatcacgatccaggcaaatcgactcaacattttctggtaaccagttcaattcttttaaactttcttgcgttacgaataactgaatgctagcatcttctaaaatatattgaagtcgttgctctggatatgttggatcaagtgggacataagccccaccagccttcaaaatccctaaaatacctacaatcatctcgtgggaacgttcaacgcacagtccaactaaagtatcaggtcctactccttttttctgcagataatgagctaactggtttgcacgtccattaagctccttataagtaattttttctttttcatacgtaactgcaatagcatttggataaatcatcgcttgccgttcgaacatttcatgaatagttacttgaggcgggacatccagtttaggattgttgaactcaactaaactttttcttttatcttcctcagaaatgatttctatttcagccaccttctgctttgggttttcaaaagtgttttccattatcgctaacatcacgttaaaaaaccgttttatctcttccttagaaaatagctcctcacgataatcaatatgtacatgtaaagagtctatatcaattagattttcaatatgcactgcaaaatcttgtacttcttcacggtttggaatccatagtgagtcaccactttcatcacgatccctataatcaatcgtagttccgaaaagtctcacattactgttattctctttattaatctgctttaataacaaatcaaatggatatttctggtgtcttaatgatttactttgttttctggacaccctactaataaatgaaagtacttcttcttctggatcaatatccattcttaaaggaactgtactcaccatcattccaatcaattttcgttccattttagtcatacggttgccgtaagccattcctaaaccaatatcaaacgatgaggtccaccgatacatggacaacgagaaagcagcaacaaaaagggtgtataaaccaaaattgtaatcttcagaaaatttttctatctttctcttcaaatgctccgttaatataaacgtctcacgtgatgctttggtactaacttggtacgtattataaggcttcaacccggtcatagatggcagtgttttaaattcctctaaccaaaatttttgatctttttgaaaacgactactattcaagtatgtttgttcattggtcagaaattgaacatatgaatttttaatttcgccttcctcattctcgttatgcatgtcataataatattttgcaatctgctcagtaaatatttgaattgataaaccatccataataatatgatgaacatttccaaagactgcacattcattatcgtttaattttattaaagcgaaatagtataaattggaattaaataatgtaaacgtttcttttgttttctgctcaatccattcctcaagcaaatttgtattctccacattactgaaatcaaaaaactcaaattcttgttcttcatgtttaataaaatattgtttcggttcctgatgcccattttcttttaacctaatgcacagaccgtcattttcactgataacgcgattcacaacttggtttaattttgaatagttcattttccgatgaagtttaaataaaaatcttaaattacatattcctttatcagaatgaataacttctgtataccatattcttcgctgcggatggcttaatggataacattcctcattggtcataaaaatcttcccttcaaaaattatttgctcttattggttcgtgtttatgtttagcccataaatatttctgcagtgaaactccaattactccaataataacaagcccaatccctccataaacatagagttgagttactccaaataaatgcactaatgggccactcatagcaggggaaataattaaaactgcgtttgttaaactgctttgtataccaaatactcttcctacttgatcttgatcggattctatttgtaatatgacttgattagatacaagcatcagcccacttccaataccagcgataaaactaattaaataggctaaaacgaagaccgtaccgggcgttatcaaaccaatccccccaaaaccaattcccattaaaaccatacctccacatactacccagccatattgaaattgttttaatttctgagttagtaatgcaccaagtattccgccaagaccaataatagaaatgatatatcccattttacttttatcatgtgggaataaactcttaaataaagttgggaattgtgagtctactaattgtaatactgccatggctattgtaacgaaaatcatggttgataatattatccgattagataacacataaccccacccttgtacccaagcggtccaagtactttgtttttgcttttcaacaaattctttcgatatagtttctttaaattttattgtgggtatgagaactaaggtagctaataaacaacttatagctcttataatgaggcagaactctggttgaaaccaactcagcaacatgccccctataagtgggcctactatctttgtaccctgctctactattccgttgatacttactgctttagtaagcaagtccggggatacaatctgtcttgttagtgtttgctgtgcaggataatagaaaacaataaaaatggaacgaatcattaacgccactaagagccagtggatatcttgtacaaataaaagagcaattgttattagaccaaccattagattacagaacatcataattggaatttttctaaaacgatctgcaataacacctgcccatgagccaaaaataattccaggaagtgcatatgcaacaggaatcaatccaatcatagtaggatctacttcccattcaaacccaactatagtcataatcgctaacatatcaataaaaacaccaagcataagcaatgaataggcagagaaaacttgtaaataaaccctatttcctaataggccttttgaatcaatagttttcataaaagcaagctccttaggttactaatataaacgcttttgcgtataaggtacctctttattaaacttaattaatcattattgacatctcacctagaatttaacttcgtcaaaactcaaactactcttgtttttcatatatttaaaatagtcagacaaacgaaagcgtacctatttcttcatttttatatcaactgttacaaaatatatctttaccttacactaataacagctaaacgtttccttaatataaccctttacagtcgtttgcacattcaattcacatcctttttaaagttggcttttttctatctcaaatactatcacacaaatatttcacctactatattcataaagttgaaatatttgaatcagaaaattcggataaaaaactaaatccacaaatcataccaaacaattatttagttatattgtcattttatagatagctttagccataaggatatcaagaattaagttttttaattttattaacataatagtttatagagactataaatcctactaaacaaaaaaataaatatacaataaagtatatttattttttcttatcctacatattttctatgcaaattaattccaataactaaagttgataataaaaatataatattaccaatcactaatgtactcataacaagaattgaataatatagtattaatacttctgcacctactacctattttatttattggatatttatacttcaaaaaaaattacacatcattcacaattaggatacatacccaaaatatcatttgaacatgttattatattttaagataatataaaatcagtttttctataagagaacttaatttttatgtagtacgaaattgttagtaatacagcatatactaatttagttataaaaacatttaaagaccacctatttccataagtgatctttctttgtgattctgtatttgtgcactactgtagaaatatatcgtagaaacgctttgtttgctaaatgtttagttctttccatttactaaaaaacatagcttcatacacttaatatcatattcgttacattgcaaactattattttgtcttctgtacaggcaaactactaaaaatcaattcagcaacttttacatatccttttgagtttggatgaattaaatccttagaccaaagcgtattgtcattaactaaatgatgattccaaaaatcaacatgatgaagcttatactctctgctcagtgaatgtataacttcatttgcctctaataattgttcttttatttcttgttttttttcagaagcaaaaggaagcctaactgtaaaatcaggaaggtttgctataataatatcagcccctgctttacttaatgtatctatcataaattccatatcgttcttatatgcatcatgattccaacgtccttttaaaacatcgtttgcccctgcaatgagactaaccaaatctggattaaaagttaacgccttttccaattgctgcaagcgaatttcttcagttactaacccacgctttgcaaaattggcatattctatatctttttcacacagttgaacaaaatgatctacccagctttttaatgcaattccctcaacttcatcccctatcccctctgtaaaactatcaccaattgctacaaatcgcttccacatatgtattccccctttatttttaaacatatctatactatacaatagctcacaccgtaattgttatttctaagtggttttcgatttcaattatattccactttactatatttacatttagaatccaaaattgaccgattcccaagtatactaaggaatcggtcatattcgtatatttactaaagaaataaaatccctctaggacttatacttttttcaaaaaatttgttgttctttgttttgcccagttgatacatttcttttcgattacatgatacgaaactatagaaaaaagtagtgtcattgcaatgcacaaagtaagaagaaaaaattacaccctgacattccaagctatccacataagaatctatagtgctttgaaaccttttgtttcaaactaatatttagttgtatcctataaaattagctttttactatatcaatcgtacgatcccacataccactaaaaaaagatcctgttttacgtataaaacgtgtaagccaatttgcttgttccacatcagattttgttacaaggtctatttgtaatgaattacctgataagaacccaggatctgtattatctttagacgagataatcattttactaattgttacaccttttttaataggcgcttcttgttccgtattcgatactttaaattcttttttataaatgtctttattgcccttcggcattggaagtgaaacagcttgcttcgtttgaactactacatctttgtcttttgcatttgccactcgaactgtttcatgtccttttattactgaatcttttccgtagacattcttcacttcaaaattcgcaaatccataatcgtataatttctttgtttcatcaaaacgtgccgtatgagattttgcttttatcactacagaaattaggcgcataccatttctttctactgtaccagtgaaacaatctcccgcttctggagtcgttcctgttttcaaaccatctacaccttcatattgcttaattaaaccttttaacatccagttaaagttcgccatatcaattggatatttaccaccctcttggaatgtttttttaggaatttttgctgtatttaatatttgggggaaatcttgaataagacgttgtgctaaaattgcacaatcccttgcagacattttatttttctcgtctagagttgtcccttctagatgatatccttttaaatcttgatttgttaagccggtagagtttacaaatttatagtctttcataccaaactctttcgacttatcgttcatcatttttacaaaattgacttctttaccagcaatctgttcaactaaagcaattgttgcaccatttgcagagtaaattgccattgcctcatataactcttttaccgtataagagccaccattttctaatggaacatttgatagtgaacgatcttgcgaaatcttatgtgcatattcagagattttaactttttgatcccatttaagttttcctttatccaccgcttcatgaactaagtattcgctcatcatttttgtcatactagcaattgccaatgattcatctgcatttttttcatataaaatttttccggaatttgcttctattaaaattgctgatcctgcttcaacgtctatagcaggaactgtttccgctgctgcttttccaattgtaacgaccatgctacaaaatagtgtaagcactgttactattgcaataactctcttgcaaaacatacctttcacttctgttacctccaatttctttgtactcaaaaaaagcgttattctaacataatcccgcaaaaaatagacagtgttctcaaattatatatacatataaaacgttagaatcgctttcatatagaccacctcatccgacacttttaggtgcgctaatactttgtattcccacacatatccttatttttaatccccttatatttttcaaaatgattcacactttcatattttttaggattacagttaatagacaatctaaataatacatttgttccacatttacaaaaaataaaaaactacaccctatactggatgtagtttttctaactgatttatttatttttcacttcatttttataaaaagcaaataatggttcgatggatggactagataacagcggaattgccttctcaatcaatttcctatcccaatcaaaccaacgcatttccattaacatgtttatttctgtatcagtgaatcgtttctttatttccttagcaggatttccaccaactattgtatacggcggaacatctttacttacgactgatcctgcagcaacaattgcaccttcaccaatagtaacgccaggcattattatagcattcattccaatccaagcatcacttttaatgactgtatctcccttaggttcatatgattgtttaatttgctcagcgaatggatatactgtaatccattctgagtgatgattatgattaccacccattaaaatgactaccccgcttgcaatgcaaacataattcccaataatgagtttgtcaaggtgccatcccatctgttcaattggattgaacagtgcttgggacttagcatctccccacaaataccttacacagccatcttcaaaattttgatgactataatagcctgaataataggagtactctcctacttcaatgagtggatttgttactatatcttttatatactttgtttctgaccaatgattaaataatggatgcttcataactttattcctcgcttctaagtattatatatattgctatttacttagaagcttactacgactgctacattttttagctttctcaaacgacgaatcattatcttcaagcctttcttttatactataaaaaagcataacgcaatacattacaatagtcaaactgtgtaattttgaacacatcttaaacagcgtaatactgcaataaaaacatgaaaacactctaacttcgatacaaataatatattgattacatttagtttatattttgtaaaaaaattttaattgccataacaaagcaaacaataaccactattggtcgtattaatgacgtcccttttgtaagcaccatcttcgctccaatatatgatcctataatttgaccaagcatcataatcaacccaattgtccaatcgatttggccaaaaataataaaatataacaaagcagcgaaattacttgtaaagttcaaaatcttagcatttgcagtcgcccgtgtagcactatatccacataagagaatgaacgctaaagcaatcaagctacctgttcctgggccgaagaaaccatcataaaatcccagtaacggagccactgttaacgcaaacaacaacatacttattttcctcggtcgatcttcgtttgctatatttggagataatagaaaataaatgccaataaaaacaagtaaaaaaggtaatatcataattagatattctgcccgtatctgtaaaacaagccatccaccgaaaactgatccaaaaaaggtcattaagatggacaaacgcatttctttaagattaatttctttcttcttaataaaaaacactgttgccatgagagttccgctactcccttgcagtttattagttgctatcgctacagaaggagacatacctactaataacattatcgggatagttatcataccaccgcctccagcaatcgtatctatccatcctgctaatacagctactaaaaatagtagtatgagtaattcaatagtaaaatccatacaaagaatatgggaaggcttgagctattataccccaaacctccccatcttccctcctctctttaaactagttaattaaatctttaaagtaactttctttctgatcacgtaatcggctggaaacgtattgcctgcaaacaattcttcttccgtatttattatttccaatcgggattttatattcttcctcagataacctttctctaccatgagttacatttgtttgtttaccatagtatgaatttgggataattaataaatcttcagatgtaagtggaaccttataagtaggcgttgttcgtaagagttctaaaaacatgtcaaatttcaatttttcttcttcactttctcctacataaatcaatctattctctgctccatttaaacaagttgcaataatatcaccattatcatctaaaaatataatttggtttatttcccctacaaatcccgatatttcaccatcagccattcctgcgatatgagcaataggcattttacttatcgccaatatgtcatctttactgaagaaattttcttcaagatgcttttgaagtaattttggcgttccaatatgagtttgagtttttaaatttaacactccttttaataaaagagcatcaactctagtaaattttccacaagtaatttcagacactattcgttccacggatttattaagtctatttgatacaatttctaaattcgtattgaatgttttcaatcttgcttcaatatctgattggtctttcatatctgtatacactgtggcatcgttatgttgataaaagttcccgccaccggtgcttgcaccgacatttcgcaaaacttcatcgttatttaaaggcgaaataagatgaaatctatttttcccagcatgttcggatgggtgaattaaagcatcataattaaaaagtgtggcaaaaagccatgtgacccattctgcataaaaatattttttcattctatcgtgttcgtcttcaccataattaaaacctctgcgattttccccaggtaatagtgtttctataggatcacatggagtatttttaataaggataggcggtacgttcccgccacaattcgctatttttatcatatgtagtaggtttttcatatctgaattcggatttttctttgaatagtcaatcaaacaattaagccactcttttgaaaaatatgctgctatttcttgatcacaagtataaggattatgagtttttaattcattttctatcagattcttcattttatccttcaatagattcggaatagtaatttcttcaatttctgtaatctgcagtattcctttattcattataaaacctccgttgttttattttttacaccctatcttcattaaacaaactatccacttcttttttactcctttacttttcgtcagagctattagaattaccgatttacaaataaaaaacatggagtataagagatttgttcttagctacatttcccccacgaacctctattgaattgacaaatttaatttgaaaatctgattcattttcatactttactttcaaactatgtttatatgattttcaattcaagtaagagtatttcattttctaaagttttcctaattttaaaatcagaattttcaatacaactatgttaacattaaaaatataacacgaaaccaaaaaatgtaaatgaatagttttttctaaaaaatagtcagactattcacaaggtaattcgtattccattgaaccaactacggcccctcaattttattgataacaataaaaaagccccctaaattgaagtgacccccgaaagttagacaggtcgtttcattaggcagcctctagggtatttttacaggtctctcatgaaagtaaaaaaattaagtttaaacatactatacgaggagtggatgttatgaaaaactatacaaagcaattcgtcctatcttcttcttttctttttcattttcttaaaaaggaacaaaggcattcgcctttgttccttttttattgcgatctatatagggggaattgttatgaggccatataaacgtgtcttaattaaattaagcggcggtgcacttgccgatcaaactggaaatagctttaactccaaacgattagaacatatcgcaaacgaaattttatccattgttgatttaggtatcgaagtatccatcgtcatcggtggcggtaatatttttagggggcatctagctgaagagtggggaattgatcgcgtagaagctgataatatcggtacactaggtacgatcattaacagcttaatgcttcgcggtgttttaacaagtaaaacaaatagagaagtacgcgttatgacgtccattccatttaatgcagtagctgaaccatacattcgcttacgtgcagtccaccatttagataacggctatatcgttatctttggaggcggaaacgggcaaccgttcgtgacaacagattatccaagtgtacaaagagctattgaaatgaatagcgatgccatattagtcgcaaaacagggtgtcgatggcgtttttacaagtgatccgaagcataacaaatcagcaaaaatgtacagcaaactaaactataatgatgtcgttagacaaaatatacaagtcatggatcaagcggcattactgcttgcccgggactacaatttaccaacgcatgtctttaactttgatgagcctggagtcatgaaaaaaatatgtttaggtgaacatgtggggacgttgattaatgatgatgttacgatgcttgtgcatgaaaagtaatgatttcccaccaaaaaagggtgccttttgtaggcaccctttcctaattcatcatcacaaatagaactcaaccaatcccgccactttctccttacaacgctcccaaaaagataacttttcaaaaaactctttcgtcatttctttcgaatcatgaaaatcctctgttaacgccttattaacttgtcctacaataggaccaccataaatataaaaattcatttcatcatttatattgaagctacgcgaagtaaagtttgttgtaccaataacggttaattcattatcaataagcattaatttgccatggaacattccttttttatacccatatacagtaatcccattattaacagcttgacgtatgtatggatacgccgcttcttttataagaggtagatctggtttatatgaccaaagtatttttactgtaacaccacgcttttgtgctgcgattaaagcattcatggactctttattttttgctataaaatacggcgttgcaattacaatggagtgctgagcttgttttatgagctctatatatttttcagcaacgtaatgcccattgtaactagtcatagtatgtaatgtattccctttactagctttattcgtactcctctttatctcttctttcgtatctcgtttccaatctaaagcgaattgctgttctaaatcttttgctccttctcctttaagccgtacatgataatcacgccaatatccaaatcgcttatctttccctaagtactcatctcctatattaaatccgcctgtatagccaatctccccatcaatcgtcgtaatacggcgatgattacgatggtgaaatgaataaaatccgaatggcaatgcaggttttctactatatgtaaaatgcacaccactttcccgtaattcatttatcatctttctttcaaatgataaatcattaatgcgatcaactgataaatagacgtttactccttcttttgccttctcttttaataagtttaaaaaagtatgactacttttatcatccgacaaaatgaagaaataagtgtagatggagcttttcgcttttttaatatcttcaaatagctgctcatataatgatttcccttctacatataattgaaaatcactataatgaggcgcatactctgtcggcatgttttttccagcttccattttcctacctaaggtaacatcgatatgcatacaaattaaaataaaaacgaaaatagcaataataatagaagtaactcttaatattttttttatcattttggtttccttccaatcatattccttactatttcgtagtgtttcatttaaatatgttttcatacgaaatgtatttcttatttttattgatactgaacagttaaaggagatacgaatatgagaaaaggaaaaactcctattgtttttatcccaggtcttttcggttcaatgagcaatattattattcccggcactggtaattggagttttggactttctgcatttgtttacgaaccattcatcatgatgctagaaagtatggggtacgaacgaaataaagacttgttcatctgtttttatgactggcggcagcgtattgttctttctacacaaaaatatttattacaaacgattgcttatgctaaaaagattacaggttgcgataaactaaatttaatttgtcatagtatgggcggccttcttggacgttcttacgttcaaagtgacgaatataaaaatgatgtgaatcaacttataatactctgcacaccaaacgctggatctccaccaaattatagttattggactggaggcagtctccctatccatgcctcttctaaaataaatatcgttcatttttatatggaacaatatatttgttacttaagcatcttacataaaatcaataaagttgaggcgatacacatttactttccaggattacaagatgttattccttgtaaagattacggaaattatttatttataaaatccgactcttctattacatttcttccttatagtaagatgaaaacgaaaaaccctttcctcgatatattaaatacaaatagatttattatacaaaaaagaaatattgaaacgacactcattgccggagatggagaggaaacaactcaatatttacaagtcgtcccttcacattccaaactgaaatggacagacggcaaagtcgtcggtgatttacttacaaaacatggtgacggtaacgctgttctacatagcgtttttcttctagagggaaataaatatgttttgcatgcttcacataacgaagtgctctacaaaagcattcctatactacaaaagatactctaagtttcaaacaaaaaaggtatggcattaagccacaccttttcacattaaacaaaatttctcgcgtcattatttcttccaaacttataaatagcaattaagaagaatgcaattgcgaaagcgaataaaattaaaatgtttaaatacaactccgagaatggtattccctgctgcagttttgatatcgtatctaacaaccagcgctgcggaagaaaattagctactttttgtactgcacttggcataatgtcatatgggaaataacatccagcaagtaagcatgttggtacaatgatcatattttgcatcgcatttgccgatgctgagtttttcgaaaaagctacaaggactaatgatattccaattgcgattaatgcaaatagcattagtacgcccatcatcactatgaaaggcatattgatattcgtatgaaaaacattcgttaggaataggattgtaatcaaaatttgtactgttagtattatgatatttactccgacattagataatataaacttcttcccatctatcggcgttgataatagtctaaagtacgttctattctctttttcttttaaaatatgacctgataagttcgctgctgaaaacagcataaacataataaggtaacccatcgtttgatttgtcatatctttatttttcgaagtatcttctagcgtctcagttttcattttaaatgaacttttttgataccctgcgtacatattgtcgaatgtgctttgatctgttccggctactttactaatagctgctatattatcaatataattatataaatatgattttataaatcctgttacttgatcacctttaatcgatgaaatttcaatatgctctggtttcccttctcgaacactttttgaaaaaccagaatctaatgtaataactccatcaagttttttggaagtgagtttatcttctatttgagactccttaaccttactcacattcacatgatttaatccttctaaaaactttatcgtatcatttgctatcggctcattttctttatttacaatcccgatatttaacgttccttgccctgcatttccgtatatcgagaaggaaatgagcgtccctattatcggcaagctaattataattagtaaactttttttatttttcaaaagcacagataacgttttttgtatgagccataaaatatccttcatactatagcccctcccgtctacgtaatgcaataattgcaattaataaaaagagtgctgaaattccaatgtttaaagaaatgactggtagtgctgcccctacatcatttgcataaataattttcataacagctgtatttgcccaagttaatggcgataaattcgtaacgaaattttcttctactacgaaatatgcacctccaaaaatagaagctaattgcacaacaaccataataattgccctagacgcttcagctgttttcgtgatatatccgattcctaaaccgaagctaattgctagaaagacttgtgttaataaaataagaaatatgattccaagatggtcgccccaattcgcttgaaaaacaaatttactaaataacatgacgagtaatatgcacagggcatttgctactaggctaccaagtacttttccaatgaatatttcagctttacttataggtgcagcaatgagacgatctcctgttttacgtattcgttctcctcgaattaaagaactcgctcccatcgcagcatacagtgcaatcatcgttgtcattacaaccgcgtagtaatccatagaacctggttttttcgcagcttgtaaagatgtttcttttatataatcattatggtttccgtttgaaataactgtgctcaccttagtaggatctacttttgcaacttcgaccgctacattgtacttatcaacaaatgttgtaagcattccttccacaatactcccctcaatactacttttgtcacttccgtaaaattttgcaccatctttatttaactctacataagcagcatatttatttttcttcacttcttctttcccatctatactgccggaagcttttttaaaatgaatacctgatttatccacttctttcgtaaatgctgcaaatgattgagaaaacgtgctactcgcttcatctttatatagcacttgtatatctttaatcgaatgactatcactattaaatgcgttggttaacgctgttcctaacacaagcataagtacaatcggaaatgctaacataaaaactaaagttcttacgtctctgaaatctcttttaatatgcataattgcaatattgaagatgttcaattgatgaacctccctttaccttttcttcatttaccttttatttatctcgtaagtttcttccggttaacgtaagaaatactgtttctaagtttggagcctgctcctctaacgaacgaatttcaatgtcatgattaatgaaatgctgaataatttgatttaaattatttaatcctgcatccgagtttaccttgattacgttctcttcaatttgaacagctttcacaccgtttatctcttttaacttttctacatctaaattttctactgacttcacttcaatccaaatatctttcgtatctgtaataatcgcttttaactgttctttcgtaccttctgcaatcactttaccatggtcgacaattgcgattttcgtacaaatctcttctacttcttccatgtagtggctcgtgtaaataatagtgcttcccatttcatttaacttccggacagactgaagaatatagtttcttgactgcggatcaattccaactgtcggttcatccataataattaacttcggtctatgtgcaattgcacaagcaatattcaatcttcgtttcatcccgccagaaaagtttttcggataacttttatgtttatcgctaagccccacaaattgcagtgcttcctccactctcgcttttagctcaactcctcttaatccgtacaacccagcaaagaatttcacattttcataggcagttaactcttcataaatcgcaatatcttgcggaacgataccgatattcatcttcgcaaatcggttatgtttctttatattttttcctagtatgctaatttcgccttcattacttcttaacaaaccagcaatcatattaatcgttgtactcttaccagcaccattcgatcctaaaaagccaaatatttctccttctttaatagataaagacatattatcaactgcgatgaaatcaccaaattttttcgttaaatttttaatttctaatgtattcatcatttcacccctatttcggtttctctgcttttagtataaacaaaaagaatgaacctgctcagtgcagaagttcattcttttcacatgagattattcacttttttcatatgagatgattcatcctcatatcggcaacaacattgttactgcaaaaccacttgttccatctacaataatttttccgtttactgacgctgttcgctcctccatccccataatcccgagacctttcttaacgagaaccgcaccttttccgttatccttcacttgtactttcaccatcttgttaagtacatgaatatcaattgagatgactgtcgcatcagcatacttcatcgcgttcgttaatgcctccataacattttcaccaataattttccactgtatcggagaaatcatatctaagttccctttataaacgaaaggaatattcacatcattcttaccggcaaattcctctatgaataatttcatacgatgaataccaatttgctcagttggtggcttcatatttttcaatgtaatgcgaatactttcaattccatcttttgaaatgtgaattgcattttgtaataactccgcagatttttttttatctatttccattaacctctttgctgcctccatttgaataagtgcacccgtcatcgagtgaccaattttatcatgaatttcttgcgataaccgatttctctcttctagcttaaatgtgtattcagattgtcttatgtactctttattttcatgtaagcttttcgtaagtcgttgcatatcttttcgcatcttatcattttgcgattcaagctttactacacgcgatatatatcgatctgcaatagttaaaacgagaaaagaaaatgcaacaattaatccataagtcattcgaatactttcatctgcaatcgtaattgggagcatcataacgacaaagcgtggccaattcttttctatgtaatagaatgtaatttcgtataagttcaaagataaaaacaaaataaaaaatggatgaaccctccatgtaaataacataactacgccaatggatatacagattaatatttttttatacgtatcttttttaaatatagaaatcattacgtttacagaaaggtaaataagtaaagtaaatataacccacggtaaatttgctacatttgcgtaaatataactgaacacaatatataaaaagacaattaatttacttacagttaaccaaaattccatatcattaatctactttccctgttaagtaataaatcgcaatttgtgtgcgatgttcaagtccagttttccctaaaactgacgtaatataatttgcaattgttccctcagatataaaaagctgtttcgaaatttctttatttgagaaaccttttgcaattaatgcgataatactaagctccctttctgtgaaaaggctcttatcaattttacattcttcctctttactttccattaaattagacttaattttatcgaggacaacatcttgcataacagtttgaccgttatatactccttttatcgcatcacgaatacgctccggatcgttattttttaataaataacctttcgctccgttttttactgcatccaaaatatattcatcatcatcaaacgtcgttaaaataagcggttttgttttcgtctcttcacaaatgaacttcgtcgcctctacaccgttcatatttggcatacgaacatctaaaagagcaatatcaacttcatgctttttacaatacgctacagcttcttccccatcatttacagtatctactacttcaaactcttcgtatgtatttaaaataattttcataccttctctaataaaagagttatcatctgctattaatattttaattttcatgtttgttagtatggacctttccctactaacattcacatcctttctccgtgtaacatttcctacttgctcattatatacttctctttaccattttttcacaccttttttcatctagctctcccgcaaaaaatatattattctttttttacaaaatgtgtagggtgacttatcattctttacgtctatataatagaatgcgtcaaaaaggagggagagaccgattgaggaaaaacaattaattgaaaaagcacagcaaggaagcgagcatgcttttcgtatccttgtacaaacatatcgtcattatatttttcaagttatcttttctattttaagacatgaagaagattcgaaagatgttacacaagaagtattcgtaaaaattcacacctctctcccaaattatcaatttcgcggattaaaaacgtggatggcacgtattgccaccaatcacgctattgattataagagaaagaaagctagagaaagtgaagaactctccttatgtaaagaagctgaagaaaatatacagtcctctcataatattgaggctttattattgacgaaagagcaaaaattactcattgctcaaaaactgcgagaacttcccgaaaattaccgtgacgttgttctcgcacattacttagaagaaaagagctatcaagaaattgctttacaggaaaacatcgaagtaaaaacagtcgaaatgaaactgtatcgagcacgaaaatggattaaaaaacattggaaggaggaagagtttctatgatgcattattcaaaagaagattggcgcaattatacattagattttatagaaagtaatgaacgtgaatctatggaagaacatctttatgaatgtgatcattgtttagcactttatatggaaagtattgatgaacaacatgaaaaccttccaatgataaatgatgattcatttacgaacgaagttatgacgcaaattaattttgaaacactacagtctaatgaaaatataaaaacaacctcactaaagcgcacgatcattcattacataattgcgactgcggctacaattatttttatggtaagtggtttatttcagtatatttttacagcgacatcaaatttagagaaatcttcaaaacataacgagtcttctatttcacaacaaattgtaaacaaatcggtagacacatcgaaaaaggacggaggttcaaagcatgaataaaaatccctttttagcacttgtattagggctaattcctgggcttggacatttatacttaaaaaagctaggacggtttattttatatagcgggggatcactatttctattctcctttgcagtattttgtaccatagtagtaagagaacgtgatattgcttttctttctctatttttactagctgttctatgggtaattaacttactagatttagttatcaccattataaaccaaacgaaaaagcaagaagctggagaagtgataaattcctctaaagagagcgaacgattttatatcattctcttatccatcatccctggacttggccatttccaattaggacttatgcaacgcggacttacatttttagtagcttgcacaggaatcggaagtatgatcattttcgttgcacttttaacatcgcaagaaagttttcttatcttccttattacgttacctgttttatggatttataatttctttgacgttgttcagcaactacagaaaaaagaacgtggcgagcaattaattgaccgtactattttcgaagattttgaagagcaccgcgagcagggaaagaaaagtaaaacatttgcttctattttagcgatgttccctggagcaggtcatatgtatttaggcttacaacgccgtggtcttcagcttatggcggccttcttactatctatttatttactcgacttattaagactttctgcgtttttatttttagtaccaatcatttggttctatagcttttttgatgcgttacagcaaacagcaaaatacggaaaagaacgagttcaagacgaacccattatcgattattttatcaatcatcaaagatggatcggtatcgggttaattacactcggtggttattatttattagatcaaacagtccttcctattttgaatgattactttgcaactatatttaacattcatcttagcgagctatattatcgctatttccaaacatctatcgttgcacttctcttaattggcggcggctttaaattgttacttggaaataaagaaaacaaaggtggtacaaaagaatgagaacatggcgtgttggaacattctcaatggggctttctattatatcgttaggatgctttttacttttttcagtcgtaaaaggaattcaagtattagatacactaactgcatggtggccagttttactcatcatacttggagctgaagttttactataccttctattctctaaaaaagagcaatcttttattaaatatgatatttttagtattttctttatcggcgttttaggaagtgtcggaattgctttttactgtttattatcaactggattactagaagaagttcgtcattctattaacacaacgaggcaaacgagtaatattccagacggacaatttgatatacctgaatctatcaaaaaaatcgtagtagatgcaggacatcagcctctaacgatagagggaaataatacaaatcaaattcatcttttgggaacttatgaaatgacaacgaaagcaaatgaaaaactcaatttaaaacgagatgatttcctttcagttcaaacggctggagaaacgatgtatatcactttaaaatcattacctgttcagcatacgttatttaattcagcaccacaggtgaaaccaacgcttgttcttccgcaaaataaaaatgtggaaatccgtgcttcaaataacgaactatctctttatccaggtcaattgcaaaataattggtttgtacaggaaagctcaagagtgtctgtccatcttgcaaaagaaagtgatgtatctttaacagcagtaacgaatcaaaaagaaacccatggaagtacaccttgggaacaagtagaagatttaacgaaaaacgaaaatacttcttcagaagaacatccagaattaaacaaccaagaacattggtataaaaattcgattaaaactggaaatgggacgtacaagttaaatattgagaaagcttataatttgaatatgagtgttctcgaaaaataaaaaaccttccgcaattgcggaaggtttttctcatataatcgctttaattccttctaacactaatccaatcataaatccgcaaaccgccccgttcactcggatccactgtaaatctttaccgacattattttcaatcatttcgattaacgttttatcatctaacttatcaagattttcttgtacaagcttaccgattttcgaatggttcttttccacaagtgtgacaacttgcttttgtaaccacttctctattttttgaacagtttgttcatcttcttttattttattcatttgtttttgtaaaaatggaataacatatttatcagcaaattcttcattatttacaaaagcaactgctctttgctgtacttgctctagcatctcttttattttgtcagtagcattccaattcgcaatccacttttctttccaattttctaattcctgtaataaggcttcattttcttttacattgataatttcttgacgaatcttcgctaatataagttgtcttgtgctattatcagcctcttgtaagctgttaatattactaatgataaacttctgcaaaatgccgccaatcttatcttcatctacaatattcataaatgatttcaaagtaaactgcaagaatccatctacttttatattttccatcgccttcatacctaagctaccgagctggtaacgagcttcatcttgcgctgtccaatcttttaccttcactaatatgtaatcaagtgtcttttcatcatattcttgcactactaattgatcaacaagcacttgtaaaatgttatttgtattaattgtatgtaaatacgtctttaattctttttcaataataaccgctaatttttctgtatcgattgaaacaatcgccttctcagcaatcgttacaatgccttttttcacagcatcagactgcatttctctctctgcaatttgtagcaccatttgtgctagctgcatttcttttactttattcgtaatactttctttcgttagccactcattttctaacgtattgatgagccctttcgttactcgtttacggtttttaggtaacaaagctgtatgcggaattggaattcccatcgggtgacggaataatgctgtaactgcgaaccaatctgcaagcccgccaactaacccagcttcaaatcccccttgtataatctctccagctatcgttccttgaaaagggatagaagccgcaaagcctacacccataaccccaagcgaaatacccgctatatatttagtctgtaatgacatcgtatacacatcctcttattatgtaaaataaagcttttttgttgtatttattcaatattagttatcctttatatatactataaagaactattgtgaaaataacaaagatttttatgtacatgaaaaaatgaggctacaattagcctcatttttcttataccgttaactccaaacctttcctataatattcattcattacatcttttggaaccatacttccacccgttccccacacaatatgagtaccttttttcaccttctctgttaactgttgcttttgtaaatactcatcttctttacatactttcactggccctatcatacctgctagtgcagaaggctctaaataaatattctccgtgtcagctagttcttttaacaatctatataactcttcatcgcttactgtgtaattcccactcaaaaatggttccatcgttttaccgacaaatccagacggtcttcctaccgctagtccgtccgcgtctgttacattatcaatcccgatatcttgaacagcaattttatcatgaagtcctgtcattaaaccgagtaacatgcatggagagtgcgtaggctccgcaaagaagcagtgcacgttgtctttatacaataactttaaaccaaatgctaccccgccaggtcctcctcctactccgcacggaagataaacaaataaaggatgattttcatctactacaacctctaactcttctaattgcttttgtaatcgcaatgctgctactgcgtatcctaaaaataaatcatgggaattttcatcatctacaaaataacagctaggatcggcatctgcttgctgacgcccctcttctactgctttactataatcagcttcatactcaataacgtttacacctttacttcttaataaatcttttttccattgtttcgcatctgctgacatatgaaccgttacgttaaaacctagtttcgcactcataatcccaatgcttagccctaaatttcctgttgaaccgaccgcaattgaatatttggcaaaaaactctctacatgtatcactatctaaaatggaataatcatcttcttctgttaacataccgtgctgcaaagctagttgttcagcatgtttcaacacttcataaatgccgcccctagctttaattgatcctgatatcggaagatgactatcacattttaataataattctcctaaaataggttgcttgtaatttgtctctaaagcttctttcatagaagatattttcactaaaggtgattcgattatgccattcgtccctttcgtttcaggaaaaactttcgcaatatatggtgcaaaacgctttaatctctcttccgcatcttttacattctcttcattaagtggtgaatcttttattgccctttcatacttttctatgtttggatttatccaaaatacttcttctgttgcaataagtttattcactaatgggtattctgcttgtaatgcccctatttctttcattttgtttcctccttatatccttgtagctcaccatataataaattataattaaattaattttaatatagtttaacacaaatcgttaactttagttaattttaatttaatttatttaaatataatttaataacccttaaggagattttcattatggaaaatatagatattggtaaaaaaattgaaaaacaaagaaaagaaaaaggtttaactagtaaagaactagcaaagatggccgatattacaccatctatgttaagtcaaattgagcgtgggtccgctaacccttctattcaaacattaaaagtgcttgctaaagctcttgatgtgccaacatttagctttttacttgaagatacaaatacagacgatttaattgtacgttcccataaacgaaagaaaatgattatcgataatttatcatatgaaatgctttcacctgatttcactggaaatttagcaacagcaattatgaccgtcccgcctaatacagcttcatcagaaaatgtgctagaacataaaggagaagaattagcatttgtcttagatgggaaaatcacattatatttaaacgaggaagaatacgtattagaaactggcgacagtgtaaagatacctgcttatttaaagcataaatgggtgaatcattttgagaaaaatgcgatagtcttattttctgttactccgccgattttttaatatatgtaataaaaaatagccatgtacggggaatatccgttaatggctattttttattttttcggcaccaacaaaatccctaaactaataatacaaaagctcattatttgctgtgctgatagaccaaactgtaccgaattttgttcactaacaagcgaaataatgatttgagcaaacccctcaacaattagaaaaatacttatattctttccatttccgatcctttcatttttcatccataacaagcccattatacaaaggttgaggataatctcatatacaaaaataggatgatacaaaaatttagattcgtatatattcattccccatggtagtgtcgtttgtacacctacttcatgatgtaatagaaaataaaagataatacttacacacagaccaaaaggcaatgcatcaagtaaaatacgaagcgaaaattgttcctttttacttttccaaacaatgtatacactagcaattacgcatcctactacaatatgttgcatacttcctatagctaataatgcttgcaatggcgatttaaaagcccatacaggatttaaaattgctggtgcaaacttccatacaaatacgatgataataaacgcatttgttacggcatccatcattttttcatatgatgcattttgatgcctcatctttcgtttcatcaacataaatccaaatagacttccaattataagagatacgggttgtaatctcacgatccactccatcatcacgaaatccccttttagctctcaatcaatttcttaaatttcttttctaattgatctggtggtaatacacctcgtacatgatctactataattccatccttattaacaaaaaatgtcgtcggtaaagagaatactttataatctagtccagctactccgtccatatctagtagaaccggaaactcaaatccatagcgattagcaaatgcgcttgcttcttgtactgggtcactaacagttgcattcaccgcaaaaatttcaacatcctttttatatttatcatacatatgaactaagtcaggtgcctccatttcacacggcccacaccatgatgcccaaaaattaataatatatggttttcccttggcatcatttaacgactgcaactttccgtctaatccttttaatgtgatgccaggtgctttaaaacctacttgtggtaatacttctttctcttgtaactctgcttgctttgcttttctttccttttcttctttctttgaattataaaagttaacccccgcccaagcgagagcacctactagtataatagcaattagtttcttcacttttcttcctcctcatttttaaaaacctgtaaatccaccgaatagacgaataaagaatgctgtaattttcgtcatttgatttgtatacaataaaatacctgtaatatatgataaataagatatatatagcgataaaaagtataatgatataaatgacaacactctatccacactacatagagtagtgtttaccctaaaaaaaagaggctatatgcactctccgacaataagtacaatcgacacccagaataaccctactgttacatataccgagttcgtatgtaacggaatagtaagcttagcaaccttttcatttaacacttgctcgattcgtaaatttattgctgtttttgcaaatgaagctgtaacacatcgattttccattgtctttattttaattaattttaataacgcgctacctaactcaaatgaagattccattttttgcatcgcatatttatctgctgctaactcttgatacgtatgatatcgttgtaacaattcttttaatatcgggatgtacatcattccttctgctaataacgtaaaacaaaataattttagcggatcccaattattttgatgatattcttcatggaaaataatcgcatcaatctcttcatctgaaaacgtctgaagcaaaccttccgacatgacaactttcggacggaataatccaattgtaaacgctgcaacttccgcagtcggcagtatatatatttgtttcccttttctaataaatgggataagtactttttgtacttttttactatagaaaaattgccgccaaattcttttacacacaatcaatacagtaattaataataaccccgctattataatacgaaccattgatagttctttcatatgtttttctaactgaaacaagcaaaactttgaaaggaagaatgccttattttgaaagagaaatggatatgtaacataatacaataacaagctgaaaaagagggtactaacaatgagcgctaacaatacgattttacgcatttgccatttcatttcatcgatcctctttttttaactgattcaatttgtcttctaatttttttattaaattcggatcagcctgctctaactcatctatcatatgtgttataactaaatctccaaattcccccactaattcctgtgtcattttcttcgtttgattggataagaattcttctttcgtttgtatagcacgatatatgccacttcttttcacagtctgtttttctaagtgtaatttctctactaacctgttcataactgtcataacagtattaaaattcacaggcgattcttcacttaatttctgctggacttctttaatagtaataccttcagtagaccaaataatctccataatcttcgcttcaagcggtccaaagaaatgatttaatccttgctcatttaacctatagttttgcgtaaacatcgtatgactcctttcacactacgaattgtagtacaaattaaatgagaggtcaaacgcaagtaatacaaactaaaattcactacctataaatacgtacatcattctattcattataagcctaacttatctccaaatgtatcaaagagatactgctctaatatttgtacactaaacttttcattacgtccaagtgcaaataattcccgatctttcgctacgatagtatctaacggaataactacattatccactatttttgtaatttcaattatattactttttacatttacttctgttttaaattcaacgttttctaacactatatgtgaacgtcttcctgatgcaaaaaaagtaaaattaggatttttaacaacgccaatttcagtctctaacgcatataaatagtgaaaaattacatctctatgtccatcttttattattttttcatccttctcatcgtctaagtattctttcagcttcgttgtaaattcaaatcgaaaatccacttttttcacgctccttctttgtatttcatattaaacaaatatattgaaataattttaccatattgtaatacaacttcctattaaaagtaaaaactgttttagaaaatcgctattatttccgatacccttttaaaatataagtataaattcaatatgaatgaatgcttcattacatctatttaaacatattttttccattttttgaaacattagtatgaaatattatatatcaatgaatggtttctaatgtattggtatatatagtcggtagtttctttactattccgatatacttaagctacattttctaattattgattacattacggaaggaatgtaactctcttctatcgaatttttatataacaaaaatgattaggtggtgctttactatgaaattagctgtcattggtggcggtgatttacaagattcaaatcacttgcctattaatgaacgccttatagaattaacaaataaacagtatccaaaagtattgtttattccaacggctagtcatgatgatgaaagctatataaaattatttttagacacgtttgaaaaacaattacattgtgaagtacaaattttacgcattacaacagattcaccttctaagtatgaaatagaggagatgattcattcagccgatttaatttatctaggtggcggaaactatattcacatgcttacgcaatggaaagaacatagacttgatgaaaaattattattggctctgcaacaaggaacacttattgctggttatagcgctggtgctatgtgttggttcacgtctagtatccgatcagattatgaaggttctggttacatagagagtaacggatggggtattgttaataaaagattttgtccacattataatcaattaaacagaatgaacgccttccattcctttttacaaaatcatcaagggaatatagaaggaattgcactggaggataattgcgctttatatattacagaggaatcctttgagattatcggtgaaccggaaaaagcgtgggagttttatatgagtgataaaacactcattagacaacattttgatataactttaaaaagctatttgtaaacctgcacttacgaaaaaatgtccctaagtctaataacttagggacatttttctatttaactaactaatcgtgtaattcgtttcttttgccatgaaagcttataatatgcatactgcaatagtaagctgacaataaatgctgctggatacccgatccaaatgccttctattccaagacttgtatggtaagaaagataatatgctacgggtacttctacaagccaaattgaaacaactccaataacagttggccaaagtactgtaccgctcgctcgcattgtcgcactaataatttgtgcatgaccgaaaattaaataactccataacgtaatcataactaagctatgagcaatttcaattgtagtttgactcgttaaaaatagtgataaaatgtctcttgagaataaataaataagagatattaacacaccaccgatgacgtagttcataataattccggccttcacaactttctgcaatcgatcaaattgattcgccccaattgattgtgctgcaaaaatagaaactgtaataccaaggctaactgctggcatttgtacataacttgcaacttgattcacaacgccgtaagcagctgttgcatccgaaccgtaacgatttacaaatgcgattacggcaatctcagataatgaaactaatatcatatttatacttgccggtataccgagccttagcaatagctttaataactccccatccattcgaaggtattttctaaccgtgccatctagttgtaatgggtgatttttcttctttaaatacacaagcaagacaataaacgtaataactgtagatataacagatgcataggctgctccatacacatctaatttcggagctcctaaccatccaaaaataagaactggtaataaaatcatatttagtgctgtacttacaattaaaaagtaaaatggcgttttagaatctcctgtacctctcataaatgttgtatatgcgaaatataaaaataatactggcatcgatataaataaaatccgtgcataatgtacacttatttcaataatattttctggcgttcccattaggcgcataatatccatcgcaaaaatacttcctattatcgccaacacaactccaataataaaggtaaatgtcagcgtcgtaccaacgatagcttttaaacgatcttcgtttttagcaccaaacgcctgaccaattaaaatagagctccctgaaccgataccaattacaaatgaaacgagcaagaaaaataatgggaagaatgctgatatggccgctaaatcattaactccaagccatcttcctactactaccataccaaataattgtccaactgattgtagtacattacttaataataacggtactaaaaacatcgacatcgatttccaaattggtttactctcactttccaacttatgtgactccgcaccttctttattgttatctgcaggtggtttcaaatttcatttctccttttcttaaaaatctattttcaatatctatctctttgtatagttgttataatactgtgcttctattcattttcttttcatatgattataacttcacccaatattgacttccatcggctgttcgatctaaaaatccatattcgattaaatatcttcttaacgttacgaaatcagggtatacattttctatcactgtatttacttctttttcagtatactttttattactatcaaacttcttcactaaatgacgcaatataattaatttacgcttttgtttcttcggaaatttagagagaggtccatctaacccttctgtaaaatgagcttttaatacttcatcattttcttcttccgtaatattgtatcgatcatccaccatcgttgctgttctatgaattggtacaaatttggtttgtacttttgatttttcttctgataattccattagcgctaaaaatacttttgcttgcttcattttctctcgcagtgtaaatcgatgattacgaattgttgatgtacttccgccatccaactcttttacaatttctttatcattcagtcccatatagaaaaactgaaccattttcttttgtaaatccgttaatccagtaaatttcttatccatatttagcaaataatcaaacatagacgtatgctcattttgaatatgcaattggacgaacttctctgcttcatacaaaacttgattatcttgataaataacacctttaataaatgtttcaccacaagctaagcaaatgtacccctctttttcttcattaaacacataccctttctttaattcctctattgacgcatcccaaaacttctctgaaatatcgctcatactaaacactccttcaaaatgtttgtttaaaaaccaaacaaatcgctatatcgtttattattacttcatcatcttatcacaacacaaacaaacatttcaacgtttcgtttgcccattttataaacttttataaaaacatctatcgaaaggatttaatacaacgaaaagcgaatatgtttatacaaattcattttataggatgtaaaatagaacatgaatattcttcaagacccttggtttaccgttaagtaaatggcacagaacgcatatgcgattagtgaatatggaactggtattcactcattacaaaacttcagtattcaattttaactacaaaaaagatgctttcgtataagaaaacatcctttactttttatatattctatttacagtctctactaaaaccttacttgcttgtacaaatgtatgctttcgatttctatcgtcaacaaatttattagcacaactactcataatcatcatacaactaattatgactaacgctatctttctattcttgtaagtcactttatgccactccactattacaaaacttcttttgaatttatcccatcaagaaattttacatgaataataaaacgtgtgaatatgcaattctgcatattcacacgttttatcacaatgttatgatttaatttagttaaagaacaagtataccgaggtgactaacttgaaatttaaagcgaaaaaaaatccattccacgtcattttcattacattatttataattatttttttcgtttcgttattcttccaaaatgaaaattctatttttttcactctcatgatgctgctaaatatcgtgaatctttcttcattctatttctctcactacaacgtaacggaatcatctcttgttgtaaaacacggtttcatttttcatactgaaattccatttgaagatattcgtcacgttaaatactctggtaaaaaacttcattcaaaaaaatggactagacaacaattagaaatccattacaatttatttgactcagtgaccactttcataccactagaagaagaaaaattcatttcactcttaaaagagaactgcccacagatgaaagtaatgaatacgcctgctaacaaataatatattttgaagcttgtagtattgcaagtagatgaaacataaaaatgaacatcaaaaaagccaagattctatactaagaaccctggctttttctattactcttttggagcaatcattttctttggatctacaatttcatcaaattgctcttctgttagtagcccagattgcaatgctgcttcttttaaagttaatccttctttatgagcatgcttcgcaattttcgctgcattttcatatccgatatgtgggtttagcgctgttacaagcattagtgagcgattcacattttcattaattacttcttcatctgcttcaataccaactgcacaattgtcattaaacgaaacaattgcatccgctaataagtgagctgattgtaagaagttataagcaataacaggtttaaatacatttaactcaaagttaccttggctcgcagcaaatccgattgttgcatcattccccattacttgcgctacaaccatcgttaacgcttcactttgcgttggatttactttacctggcataatagagcttcccggttcatttgctggaataataatttctccaagaccactacgtggaccacttgcaagccaacgtacatcgttagcgatcttcattagatccgcagctaatgcttttaatgcaccgtgagtatatacaacttcatcatggctcgttaatgcatggaacttatttggtgcagaaacaaattgtttacctgtaaattgactaatttcctctgataccatctcaccaaatttaggatgagcattaatacctgttccaaccgcagttccaccaattgctaactctttcatatatgtattgctctctgcaatcatacgctctgttttttcaagcatacggtgccatccgctaatttcttgccctaaagttaacggcgttgcatcttgtaaatgtgtacgaccaatttttataatatgttcaaatgcagttactttttctgctaaagtttcttttaatttcgtaattgctggtaatacgtgattttctactgcgattacacaagctacatgaagcgccgttggaaatgtatcatttgaactttgtgacatgttcacatcatcattcggatgaatatgtacgtcagatcccttctctttcaaaatttgattcccacgatttgcaattacttcattcacattcatgtttgactgtgtaccactacctgtttgccatacgacaagcggaaaatgttcattccatttccctgcaatcacttcatccgcagcttctacaattgcttctgctttttcttctgatagctttcctaatttttgattgctaagcgctgcactcttctttaaaattgcaaatgcttttacaatttcaagcggcatttgctctgttccaattggaaagttttctttactacgttgtgtttgtgctgcccataatttatcagctggaacttttatttctcctaatgtatctctttcaattctgtactccatgttttcatccccttgaaaatataatacctacatctcttataataacagactttctcttaaatgataagaattctcactcttatatatagatattctatatttatttaaaaaaattcctcttgacctaaacttaagtttaggctgtatcctttccattgtaacctactataacattactggaggaattcaatatgaaaaaatatgcttttataacaggtgcgaataaaggaattggatatgaacttgttcgtcaattagcagaaaaagattatcacgtatttttaggtgctcgtaatgaacaacttggacaacaagccgtagaatctttaaatgtttcaaacgtttcctatattcaagtagatatttcaaattcacaatccattcaagaagcaacaaagaaaatttacgaaacgactgatcacttacatttattaattaataatgcaggcatagcgctagacttcaatatgctacctagtgaattaaatattgaaactttacgccaaggatttgaagttaatttttttggaactttccaaatgatgcaagcctttttgccattattaaagaattcaagcaacagtaaaataataaatgtaacaactgacatggcctcactaacaatgtttgctaatggtgaaacacatccaattaatacactaggatataattcttcaaaaacagctattaatgctttaacattagcttttagtaaagaatttgccactaacggtccagaagtatttggggtaactcctggttttacaactacggatcttaatggaaattcccccggtggccatacaaccactgaaagtgctaaaattattattaaatatgcattaagtgaaacaaactataatggtaaaatacttaacaaagatggcattataccttggtaataaaaggatgaatgatatgtattatacaattgggcaagtcgccaaaatgcaacacttaactatttctcaaatacgttattacgataaacaaggactgtttccttttctgcaaagaaacgaaaaaggagatcgagtttttgatgaagaagcactgaaatatttagagatgattttgtgtttaaaaaacactggtatgccaattcaaaaaataaaacaatttatcgactggtctatggaaggagaatctaccatccttcaaaggttagaattaatgaaacaacaggagaccaatgtcttacagctcattcaagacactgaaaaaaacttaaaaaagatacaacaaaaaattgctaaatatgagaatgaaataacttcagcaaatgctattaaaaaataaaaaaatcaccttctacatattgtagaaggtgatttttattttatgatgcttgctttcctttatctgcatcatctacataccagatgaatttgcctgtatatccgtaaataactgctaaaattaacgatacgaagcttaaccacataaacggaacgtatgagaacgttgctacacctaaaataccagccataaaaataccattatcagaccatggaaccatacctgaagttaacgttccacctacttctgagttacgcgctaatacacgacggtctatttttaatttatcatagctatcttccataatttttggtgttaaaattagtgatacatacatcgcacaaccaaatatattagctaagaatgccacgattaatgtagacaatgttacattacctgcagaatttaatttcttctcaaattttgatacgattacttttaaaacacctagtttttcaagtaatccaccaaatcctaaaccgaaaataataacggctactgagccaagcatgccgttaattccaccacggtttaataacttgtcaacaaactcaacaccagattgaattgagaatccgttataagctgttccaatcgcctctccaaagttcatcccttggaaaagggttgcccaaattgcaccaattaaagctcccattgcaattgttggcatagacggtttcttcatcgctaatagaacgataacaatgaccgccggaacaagcatccatattttaatatcaaattgctttaataaagcttcttttaaaaattctactcgattcaaatctacattatcgccgccatacatccaaccagctacagtaaacataatactagtaataatataagctggaacatctaatacgagcatagctcgaacgtgagcaataacatctactttcgccatagaagctgcaagaactgtgctatcagaaagtggtgataatttgtcgccgaaataagctcctgaaagaactgcaccagcaacaagcggaagtggtaaaccaagtccttcaccaatcgccatcatagcaatacctgctgttcccactgttccccaagacgttcctgttgcgatagaagttatagaacaaataattaatgttgctaataggaatatgctagggtgaataaattctaatccataatagattaatgttggtactaccccaccagcaatccatgttccaattaaagcacctactgcaactaaaatcagtatcgcttctaatccgttagaaatccctttcgtaattgcatcttgcaattcttgataacgaaatcctaatcttaatccaagcgcaattactaaaaaccatgaaataaatagcgctaattgaattgggagatcaaaaatcgtttggaaggaaaagacaacagcaagaaatagtaataaaagaactatgatttctagcatcgatggtaatcttacacttttcatttttttctctccttacaagtcgataacatgacgtatgtcgtcttacatgtatgtaatatacaattagcgaagacaaaacaaaattttcatattatttcgatttatttttccagtataatatattcacaaccctttctattgtaaaagtagattacgtttttcgcaatgaaaaatataaaaaatgttgtatttttatttatcccgatattttcggccaataagacccccgtctcaaaattcagtaagtgcaaagcacttaggtaagaaattaaatactgtaaaattccaaattgatatgaacgtattaaagcttcactttatttacaaagaaaaatcccatactaacttttttaatatttgctgcaataaaactttttacaactatcttcgctttttaattcacaccattattttctacataaaaaatagggcacacatcataaaaatgatgtatgccctatctttatttatacatattttgtatttcttctttatttttaagtatttcctcaaacttatcactacaacccttcggaaataacactcccagtccatatgaatgcgcaaattgaaaatgagggtacttcgcttttacctcatcccaaaacttatatacgccgaaatcactacttctaacttcaatatcatgaaataatacaataccgtttttcgcgactttcggtagccatgtattataatcgtgagaaacagcttcatacgtatgatagccatcaatatgcaaaagatttatcgtttcatcttgaaaccggtctacagcatcatcaaaagtagatcgaattaaatttcctatattaaggtagttatcgctcactactttttctactatttgaaaaaccccttctccatatggacctgtatgcccatctccagcccaagtatctactgcaaagcatttagtcgataaccctccatcttttactccctgacaaaaactaaaaaaggaagctcctaaatgtgtacctaactcaactaaagtttctggtttttcaaatcgtactaagtcatatgcaaaatctaaatgtccactccacgcagattgtgaccgaataataggactaaatgtttcaaattcaaatgatggtttatgagtaacccagttcatcgcataactccttctgcacatatttttaacaaaccaaattactcttatctttatttttttatcgccttgattatgattctatttcatgaaaatatgaagaatttattcttttctattgaggtaaagcatcatatacatatgggtcagttggcttattaattttttcgattttgtttacttttacaagtggaaagactgttcctttatatgtcgtttcatctaataatcctgttatttttacccatgtttcttctggaattttttcaatatttttcccggtaacaatcatcccccagactgatgcatccgcaatacaacaagttatgccatatcgagccactactgctttattccccgtcacatctttatccttatatataaaccctaagaatgtaatttctttccctttaaaccaattaacattttgaccaattacattcattgtttgaacataatccttatcctttacttgtagtttacgctgtcctaacatactttttactacttgctcttccgttttataagtcgttgctaaatttgatgtttcttctgaatcaactgatacttctcgctcatcaaacttaacctgtttcccctctttttcgtttctttccagacttctcgcctgtacactttgattcatacccctttttcctcctaaacttccatcaattgttacacttccaaagagaaaagcactaactatcggaacaacaaataaaacatatacaaagaaactttttatccctgattttgatgttgtatgatgtttacaacaattgcaatcatgctgtttttctcttccatctccccaaacttgtacaataccaaaaattaaaattactacaaaagctatatacgtaaatttgatcatttttggagcgataaaattataaatattccctgttacaagtagtttaaataagagcattgctaaaccaattaaaataatgccacgaatatagcgatgatatgccttctgctcctctttctccattctttctccattctttctcacctcctataacattatgatttgcacgatggtatacacagatacaatgacaattcccatcaaaaagaatacaaatctcttttgaaaatacgcaaatagcattaacgtatttttcatatcaagcataggcccaaacacaagaaatgcgagaagtgcctttatcgagaaaacatgtccaaaagacgcagctataaaagcatcggctgcagagcaaattgataaaacataaccaaaccccatcataataatgggagcaattacttcgttatgtgctactgcatccagtacattccgatcaaaaaacgtttgaaatacacttgctaaaaaagcaccaatcaataaatacttaccagtatcaaaaaactcatctacagtgtgattcataacatctttccaactcttttttttgcttatttgaactgaaacctctacgtcttttaaaacatttctttcgcgatagcaataatacacaattagacctatgaatagagcaactagaattgttatcccaaagcgtgcatatacaacgtaatcattttttggaaacgcatatacagtagataaaagaacaactggattcataatgggtgcactcaataaaataacaatgcctacatgaagtggtagccccttttgaatgagccttcttacaattggtataatgacacattcacacattggaaaaagaactcccacaaatactgctggaatcattgcaacaattggagatttcggcattactttttgaatcatatcttccgtcacaaacacttgaatacatgaagaaacaattacccctaataaaataaaaggtattgcttcaaaaatgatacttaaaaataccgtattcacattcagccattcctgcggtatatttgtgtgcaaatttactagacttgtaaaatctacaaaaaataataaaaagagaaacatagcgataagagctatgcctactaattcttttgaaactctattaaagaccaagcttctcgcctccattttatttacatgtaaacatgtgcttgtccaaatgcttcatactacagcacaaattttatagtctatttctattcttaaatcgtaatcattatgatttattattgatttttcttttcttatcgtttaatataaaacgtaatcattacgatttaaaggagagatcatttcatgaaaaaagtacctatcactgtattaagtggttttttaggatctggaaaaactaccttactacatcacattttgactaataagaataacttaaaagtagctgttatcgttaatgatatgagcgaagtaaacattgatgcatctcttataaaaaagggtggtttttcacgtacggaggaaaaactagtagagattcacaatggctgtatttgttgtacactacgagaagatttaatgatagaagtgaatcgtcttgtggaaaatggtgatattgactatattattattgaatcttctggtataagtgagcctattccagttgctcaaacgtttacttatacagacgaagtccttaacattgatttaacgaaaaattgtcgcctcgatacgatggttacagttgtagatgcaaatagattttgggatgattttgcagatggagaaagtttattagaccgaaaacaagcaatcgatgagaatgatacccgagaagttattgatttattaatagatcaaattgaatttgcaaacgtaattattcttaataagatagatttgctagaaaaagaagatgtgatagagcttcatcatttactaaaaaaattaaatcctaatgcaaaagttcttgaatcttcgtttagcaaagtaccattacaagaaattttaaacacaaatctatttaattatgaagaagccagtcaatcggccggctggatacaagaattaaatagtgaccatcatacaccggaaacggaagaatacggtatcaattcctttgtttaccgccgcaaatatcctttccatcccgagcgccttatgaattggctagaaagatggcctttagatgttgtaagagcgaaaggattcttctggctggcatctcgtaataatatgatagggcttctatctcaagcaggttcctctattacaattcaaggagccggtgagtggatagcggcattacctgaaactgaaagaaatcaaatgattacagaagaaccagaagtattgaaaaactgggataaacaatatggagatcgaataaccgaactcgtatttattggaattgatatgaaccgttcgttaattgaacaatcattagatgattgtctattaacagaaaaagaaatgcaacaaaactggaatacatttattgatcctatcccggcttttacttatacttcataacaattaataaaaggcttcagtagaatgaagcctttttactttatagtactcttatttaataagtttgctttaattatgaatacaattgtacctaaaacaattaatatagcatatacgataccaactaaattacctatttcttccaatccaagcggtaatattatagtagcaactccaactatataagaaaatgctcctgaaagcttcgctaatttatttttatctccaacaaacgtttcttcttgatatcctgctaacaaaaacaacctctttttcacatgtatttgataccctaaaaaaatgataagtaaccctacaaataaacaaactaaaaatccagctaacatatactccccctcctctacaatattttactatacataaaaaacaaattagaaatttcagtttattaatgagtcattctgtgatatattgcatattgtattcaatttgtatttttagaaaggagaattttagatcatatggattcaaatcgattaaaaggaattataatggtcataatcggtgcttgtttatggggcttgtctggtacagctgcacaacaactttttcaatatgacaatgtttcaaccgaatggttagttacgatccgtttacttatatctggaattattttgctcattatttcctcattcggaacgagaaaaaaagagatatttagcatttggaaacaaaaatctgatgctattaaaatgattttgtttggtctattcggtatgcttgctgtacagtatacgtatttcgcttcaattaaagaaggaaatgctgccgtcgcaacattattacaatatttagctcctatattcatcactgtatacttacttttcaaatggaacgttcgtctatcaaaaattgatttcatttcaattaccctttcattagtaggcacttttctcttactaacaaacgggtctgttcataacttggctgtttctacaccagctattatttgggggattttatctggattatctctcgctttttatagtttatattcaaaggaattgttagaaaaatggtcttcttccgttatcgttggatggggcatgattattgggggtattggtgtaacgattgtacactttatttctacaaacgaattcattttattatcaactatgaaatatgtaaaactaagtaccctaccgctcatcacatttgtcgtcattttcgggacacttattgccttttatttatacttagacagcatacgatacctgactccgaaagaaacaacattatttggttgcacagagccactcgcagctattatttcttctgtacttatattacacgtgccatttcaatcttttcagttattaggcgctttttgtgtcattgtaatggtgctcatcttaagccaaaagccggatgaagggaaacaaaaattaaagcttgttcatgcaaaaaaggaaaatatacaatgaaaggattgaattcactatgcctgtccctcaaaattataaaaaaccaggaagagtttcagcaaaatcactcgttttaaatcaactacaaaattggattattgaaggtgtactgaagcccaatgaaaaaattaataatggggaattggctgaggcactaggagtaagcagaacacctgtaagagaagcacttcaaatattagagctttctggattagtggaaatggtaccagggcaaaaaacgaaaattgctcctattaagttagacgacgtatctatcatttatgaaacgatggctggtcttcactctattataggaaagcaagctcttcaaaacattacaaacgctgatattcaactactttctgaaataaatgagcattttcagcaatctatagagaaaaaaaacgcaaaacaagctttagaattagatatacaattccacaatacaatttcttctattgctaaaaaccaatatattgaaccctttctagaaaatatgcaacttcacgttttacgtcttgaatatttgtttttccaaaactttgttccagcaagtcaatctattgaagaacatcactctatcattcaagcattacagaagcaggacgaaaaacaaatggaacaaataatgacccaaaactggctccgtcccatgaaagaaatacaaaaaataatttctacgaaataaaaagagagctggttacacaaaatcgtaaccagctctctttttactaatctatatagctacgcctgaatattcgcataatcttccatatcttcgtactctttttccaattcctctaaagacagctcgtataattgtcggtcgcgaatcttaaacacacctgctccaattaactcatcaattaaatgcctcttacgattttcaacagcaaaacggagttgactactcatcttttaaaaaactcctttctacgatcattgaaaatgataatctctatcaattaccacttttgattataaaagatgactctttataagtaaagtaatttcatgaaatatttaccttgcaaagtacttgtggccacattatatatatgtatgccgtgcgaaaaatgttatgacactttttcttatcctttttctttcatactttgcaagttgtctcatcatgattaaattcaccatctatttctacttgaatggtgacatgttctacatgaaatttctcctttaatacatacgtagcctcttttaatacactttgcgtttcattccctttaataataagatgacatgttaatacttgaaaatctgatgtgacagaccatatgtgcaaatcatgaacttctttgacaatcggaatatttaataacgtactttttacctcttcaacatttatgtgctgtggtgcaccttccattaatatatgaaccgtatcacgtgttacacgccatccactaataatgactaaaatagacacaagaatactagcaatcgcatctgcagcagtccatccgaaaaatttaataagtaacgcagcaataatcgctccgacggaacccaatagatcgcctagtacgtgcaggaaagcacttcttaaattcaaattacctttcacatctccgcctctcattaatatccaagctgataaaatattaataagcagaccaaggactgcaataatgagcatcccattactagcaatctcaactggttctttaaaacgacggattgcttcaataaaaatgtataccgaaatgacaataagaacgacaccgttacataatgctgctaacatttcgactcgcttatacccgtatgttttcgcagttgttgctgttttttctccgagtttaaacgcaagtaaacttaaagctaaagatactgcatcacttagcatatgccccgcgtcagatagtagtgctaagctatttgttacaaatccaccaacaacttctgcaatcataaaacttgttgttagtaggaaggcaattagtaacgcctttttattttttgaatgaccatgatcatgcgaatgtcccatacttatactcctttaagtacaatatctgtatgttagtatgaaacaaactccccatctttatcccgaattgactgattgtaaacgcccgcttcctctgtatacacacttcgctattttttaaacaatccctttttctcaaataaaacaagactacttcttttttattttcatattgtttactaatgaaagaatttttaaggaggttacttaaatgaaacgtttatttctctgtatggaacgtgaacttgttgtagtgaaagaacacaatgataactatgaaacgacttatcacttacaaaatatgcaacctacctgtatcgctgttgatccatttcaaaagaatcgtgtatattgcggaacatttggacgaggtctatggttaagtgacgatagtggggattcatggagaccaattggagattcttatcgttactttgatttccctaaagaagatggtattttgcactcctctatcacttccataacaataagctcaaatgaacaagttaacggatatggtgtcgtttatgtcggcacagaaccgagcgctttatttcgctctgaaaatggtggtgaaacgtggactgaacttaaaaatatgaaatcattattatcttcttatacgtgggcatttccgcctagaccttttacccatcacgtacgctggattacagttgacccaaataaccctaatacaatacacgtttcaatcgaagctggtgctgttattcaaagtaacgataaagggcatacatggattgataaaaaattcggtgctcctatcgatgctcatcaattacttatgcaccctaaagcaccaaatcgcctttatgcatcatgtggtgacggatttatgggcggacctgatcgtgcttatcttgagagttataacaatggaaacagttggatctcatgtagtgcaggacttgaacatcattatttatacagcatggctatcgatccagctgattgtgatacgattctcgtttctgctgcgccaagtgctgatctcgctcatcatcgtatcccttatgaatcttatatttatcgaaaaacgaaagatactccgttccagcaagtacaacaaggactaccatctgcaatcggtacagtcatttcgatgtttgcgacaaacgaagccgaaccacatacgttctacacgttaaataacaatggcgtctttcaatccaatgatagcggcgaatcgtgggaacaactaaacattccgtggaaagatgagtataaaacgcagcatccgcatgcactattcgtcactagttcttaacgaaaaaagactgcctaaatgattttagacagtctctcttttatttctttaaatcaatgacaatatcatctaacacaatatctttgctcttcgcttcttttttcggcacttctattttcttctctttcccattcacatactctactccaccatgattttcaggtgtatgtactcgcaagtgcacgcgaggtgtaacgataagctttgttgcattttcgtttagtttttggaaggtggcactccaatggatattgtaaggatcgttgccacttcccccatttccttcacccgaataaatattccctaaatcatccttaaccgtcaattcaacatctacactatcccattctttcctcgcgcccttagaaacctcttgattgtaataaagaataaatgaaactggcgatattgcgaccttttccatatttgcttttataccttctttttccgaactcccaccaattgttctctctttactatccactgattttacagttaacgcgaaattccaattaccttgtattgattttttcctatctggcatctctattctctctatattccatctaaagtttactttgtcctttttattgctatcatgatgcgtcgttgttaccatacctacatactttttttcagtaactttagtcattttaccactgcctgaactaccatgagcgtccattatatccaatccacctaatatgataggatcctcccctaagtcctgctcactttccagtgaatacgttatagataatgttctgccatcagaaattacatcattaattgtaaccttaaccccattactctcttttgtcatattcaactcagtcgaaaattccttataattttcatataaccccgttctaccattatctaaaaatcggaatatgtcacctacaattggcaatcctccagcatatgtaggaaaaccgataccaagagttgcaaccgataatcctactaaaatagatgcagcagcgacacccttcttcctacttgtcatctttttcttcgtacgtatcgattgttttacatttcgttttactttttccttttcaatttcagaagcctcaatttcttctagttctttttcatctatatcaatatcatttaatagttcataaatgtctttcatattgcactacctccaaaactaatattcgtagcattttgttgtagtttctttttcccccggtacactcgattatcaattgctgcccgagttaatcctaacttgtcacctatttcctctgtcttcataccaagtaaatatttcataatgaacaccttttgatctagcggttctaattgattaatgagcttcaataattcttccctatcttccataacgattaattcgtcttctgctgatttttctgtactgatatgaaactcatctgaaatgatttctactgttttagtcgatttccggtaataatcaattgctttaaacttcgcaatcgctgcaatccactttttaaaatcactcggctctccatggaatttatttgcgttattccaaatggaaagaaatatatcgtttatacattcctctatgagtccatcattttgaatgggaagtagaactttatgcgtgatcccctttatgagtggtaagtatgtatcgacaacgaattctaacgcgtcttctttttgccgctgtaatctttttataaaatttttctcatttgatttcatgtagcgattccccttattgttttgtaaaagcttttacaccctatataacgtctgagaaaattttttctctcatcttttttattttttgtatgtaatggaatactttcccttagccattttctcacataactatgcattcaaagaaaactttctcaagtctgtaatttaattcatgtagtacactatttatatagtcactctttaatttagtgtacattttatttcattaatctattttaaaaattaggagatgagatgtgtatgtgtggaattacaggttgggtagattggaaagaagacctttcaaatcaacatgttattttaaaaaagatggcaaatagtattgagcatcgtggtccggatgctgaaggattttggttttcacctcatgcggcctttgcacaccggcgtttaattgtaattgatccagaaggcgggacacagcctaagacatttcgtgctggtgattatacgtatgctcttacttataatggagaaatttataatttccgtgaactgagagagcagcttcaaaaatgtgggcatgcatttgaaacccattcagatacagaagtattactacatgcttatttagaatggaaagaagactgcgtacgacatttaaacggaattttcgcttttgccttatgggatgatcagaagcaacaattgtttttagcacgagatcatttaggtgtaaaaccactcttttttacagaaagaaatggcagtattattttcggctctgaaattaaagcattattagcgcatccatctgtccctgctgaaattgatgcgaatggaataaatgaaatatttggattaggcttatttcgcactccaggatgtggcgtctttaaacatattcaagaagtacgtgctggacattctataacatttacacgtcataaaaaagtagttactaagtattggaatttagaaagtaagttccatacagactctatagaagatacatcttcgcatattttatctattttacaagatacagtaaaaagacaattaattgccgatgttcctctcgtttgtatgttatcaggcggattagactctagcggtattactgcacttgcgggtaaagaatttgctgctgaaaataaaacacttcatacgtattctgttgactttgtaaatagcgcaaaagatttcgaactgacatttgctcgcactggtttagacactccttgggtaaaacgcgtttctgaacatgtcgggacagcgcatcatgatattattgtgaatgctgaagaattagcaaatcacttattcgttccccttcatgcaaaagatttaccgagtgctggtgaaatggaaacttcactatatttactattttgcgaaatgaaaaaagatgcgaccgtagctttatccggcgaatcggctgatgaagtattcggtggatatccttggtttcatcaagaagaactactatatgtagataagtttccttggctaacaaattggaaaaatacatctcctcttctactaaatgaagtaagtaaccaatgtaatctagaagactatattgatacacgattccaagaagcgatacttgaagtacctactcttgaaggcgaaagtaaaaaatccgcgaaacaacgtcaaatgttttatttatttttaacaagattccttcctttcttacttgaccgtaaagatcgtatgagtatggctgttggatttgaagttcgtgtaccgttttgcgattatagattagttgaatatttatggaatgttcctttcaacataaaaagtattgataatattgaaaaaggcattttacgtagagcactacaaccagctttacctgacgatgtacgcaatagaagaaaaagcgcttatccaacttcacaagatccacactacttacaaacaatccgtaatttaacacttgatatgtgtaacaataaaaacaatcctattttctcacttattaaccattccatcttactttcaattgctgatcaaagtaataaagtgattaacaattttgaagcaagaagtgccatggagtatatgctacaagtaaatgaatggttgaaaacatatcacatccatattgcttaacaaaaaggagttcaaggataaaaaccttgaactccttttatattaattagcacattgtttattatcagtatcaatagaccatccaataatcgtggcacagtctctacctttccactgtagtacatttgttaatacgggctcaatctgcaagcgagttccgtcgtgtaatatttctactaaagattgatcatcatcaaaccttcgtttgtcacactctaaaataccgtccgttgccattacaatgtgattcattcctttttctaatcctcttacacctgacgtaaagcaaggtgtatttgctgcaaaaatatttttcctgccaatatattcgtaatttttccgtttatttaatcgtccttttccatttttcgttttctcagaatggaataaatacgcgaaacaatcaccaactgataaccaatataaaaattcgccttttcgtaaacaaattaagcaagcgagttcctcatcatcttgatcacactttttaataaataactcatctgtaaataacgctaataagtacatatgtgtatgatgaaaagctaaatgtattggataggaaaataactcttttaatttctcttttctttctgaaatcgcttctattatataatcaatattttttgttttgtggtgtgtatcaaaaatcataacaaattcaaattgtaattcagggtcccaccaagcaagtaccgcatctcctcgttcatatgcatcactttcttgatttcccccatatacgccgactgaaagaggaccacatttttcaacatgtatttcatctacatacatctgttcatgactcatccatttgaatgtattcacaactatcatcctctctcttgctaaatgtatacctttacacatagattaccttatatttcaataaaaataaactttttcaacattttttatccaaataaaaggattttatttctaaaacaacgaatatatcttactatacgatataaaaaaggggatttattattatgaacaacattaatcaacattgggagagcatttattatcacttacgatacgaatacgaggacaatctttcccaccaagcaattcgtattttacaaatcgtttctcgtgagaaagatataacaattggaaaagtcgctactgagcttagcctttctcataacacagcatctgaacatataaagcgccttattcaaaagggtttcatcgttaaagagagaaataaaaaagatgaaagagtggtaaaccttacattaacaattgaaggaattgaagtattagaaaaacatactttactagataaagaaaagataaaaatattagaatcacagttatcaaaagaagaactacaattaattgaaaaagcattttcgttattagcgaaggaggcaaaatatgcatttcctcgttaaagtaatcgtttcggcacttattatcggcgttatcactgaagtcgccaaacattatagtacgataggtggctttattgctgctcttcctctcgtaagtttacttagtctattttggatttcatttgaaggcgggaataaacaagaattgagtcaatttgctttaggggtattatatggattccccgcatcagcactactattatttattgtctatattggtttaaaaaattcatttacacttagtacatctgtcctactcggtataggtgtttggtgtatcgtttttgcttttcaaaaattatttcaagcttagggggaattaacattcataaatttgtagaaataatggggcaaaatatagaagtacatataaaagaccaactatgagaagtcaaggggagttttttatataaatagggggtgttttataccctagaggctgcctaatgaaacgacctgtctaactttcgggggtcacttcataaatgccacgactttttatattaattcgtactaatgcctctcgctgcccaaatgcgatcgatatcagcagcatgttgtccgccatataaaagagcatccgcttgcttaatcgctttcgctccatcactgaatttagagtttggtgttaatgaccagtgtgattgtaaaatgatttttgttgctacatcacggccaaaagcttgtgccatttcgtattggccttgagcccaaatttcaccatcatcatgcacttcattcgttatatctttcggatatactttattcgtatctaatcggcgtaagcatgttggatctgaactagaataagctgtcgcatcccattctccaacacatgctttaccatatccagtagtcgatactgcatcttcatatgtagcacctaagaagtcgccaaatccttctcccatcgctccaccttctgctgaactaccaaagccaggaacttggttatcttgaatcgaatgcccatactcatgtgcgataataccagcatcttctgcatcatcaacaccgccagtaccgaaagttaaagcttttgttgatggagaatagaatgagttatcatcagttgtaccattaacattcacttttatcgaacggttattaatatttttaaaacctagactttgaatgtaacgttgcaatgtgtcgatatgatagtacgacataacatcttcaaagctatcatttgcgcgtgtatagttaaattgtaaattcgtagattttgttttcgcttttgaagaaatcgttacatattctccaattaaaaatcctgttccatctaaaccttttaacgtaacagttttcagttggttcgttagagctgttgaatctgcatcgttattatcttttaagcctactttactaccgctagatacgactgggttaggtaaaaatacttttcctgacccttcagcttttcggtttatatcaacctttttaattaactttccattttctgcatcaataaatgtttcccatgcaccaaatggattattagaatggactacaactttatatactggacgagcaattccttcttcaacaatatatccgaactctttatctgtaggagcccataaattttgctcacttgcttctccaacatacgccattgatttttgtattgcatctttttcactaatttttgtcgttacttccttcacacctgtaacaggctgataatcagaaacagcgagtactccctttccctctccgttaagcgtaactgttatttgttttgaaaatacaggtgcaccattaacaacttgttggaacctaacatatgaagctactgatgtttctgttgtagaaatatattgcaagtctgaaagatctgttttcaatccatactgcgcagcattttcttttaaatattcagttgcttttttctgtggcgaataagcttctaactttacttgctgttgtttttccaatgccgaaaccgtagaaatcgtccccattactaacggcacggtcattgccattgccaccatttttttattaaacatagaaccactccccctaataaagtagctcaaccttatcccattaccactaggcaatcattccccgcaaaacggatggataaaaattgaatctacgagtaattctctatgaacacttctattacctttccatttagggtaagtgaaattttctcaatatttatgtgtaaagtgaacacaatactttagaaagaaatttctaaatccattccttatccctaaagcttttcatattactgtttaaaaaaatagactattttttacctaacggtaggttgaaaaaatcacttgtaagtgatacgatttaaataacctttttttaggaggatctatatgagtaaaagtgaagaaacactctcttcaataatggaagcaagttatcgcctttttgctacgtacggtattgttaaaacaacttatacgatgattggtgaggaggttggtatcgcaaaaccatctatatattactactttaagtctaaagatgctttaattgaatgtatttttactgaattatgtaaagctatgcagttctcttcttatttccatacagaagagtttacaaaatcaaattttattgaaaaatgtattgcaattggccttaaaataattgatgaacagcgaaacgacccttattttaaccgagtgttacaagaatatgtattactatcttcaagaaacaagatgtacaaagatcgattactaactgtgcaaacagaatacttacatggatttgaagtactccttataaaagcaaatgaacttcaattaattgaaaataaaaatctagtttcaaaagctcatatgttagcattagtgcttgataatatcggaaattttatgatgattgatgcaaagatagattataaacaaatttggattgaagctgtaaataacatttttgaaagaaggggttgaagtgaatacaaaaaaacgcattatcggcttagattttgctagagcttgggcgatgtttggtatgctacttgttaatttcatggtgataacaggtgcagaaggaaatggtcccccttttttaataaccttcatgtcactatttgaaggtagagcctctgctttgtttgttatacttgctggcatcggtataactttaatgactaggtcagccgttgctagcaatgaacaaataaaaatttctaatagccgaaagaccatatggaaacgatcacttttcttatttattttaggattactactatatgtaatggagtggactggggatatattacactactatggtgtttaccttttcgttgctgcattactcatgacagtacgcaaaaaactattactttttctttctatcattattttattgttcgcacaatctcttcagcttactttcaatactttcgagggttgggtaggtccaactccatttataaattatgtagacttctggacaataaagggttttcttcgcaacttattctttaatggctatcaccctattttcccttggttctcgttcttcttaatcggtatgttaattggcaggttagatcttcataataaaaaaataaaaaaaagattactcttactcggtattacaatcacaatattgacagaacttttatcaaaaggacttacacacttttttattccatacatcggcagagagaccgccacatttttatttaatacaggacccatcttaccaaatgtattatatattttatctgctacaggatcctctattgctatattaatcatttgcctctatatcgctgaaaaatatagaaataattggtttgtcacttccattgtgcaaacaggacaattaacattaactcattatgtcagtcatgtatttatcggtattgggacattaattctattaaatagaatggaaaatcaatcactactattcgttttattatttgctactgcatttttcattttcagcattttaattagtgtgttatggagaaagaaattttctagaggtcctatcgaatggattatgaggaaattagccggataaatttccatcatacaaaaaggaagttggaattattccaacttccttttcctttaatgagccgcgcttaatttaattcgaactttcgtttcacctaaagaaagttcatcgtcttcgttcgttaagtgaccaaatgtaaattgtttaacgagtaagttttcttccaataaatctttatggttcgttaacgttcgctgtagctctacttctgtatcaagaataacatcgactcgtaaattaactggtaaattcaactgtttacgatattcttgaaccgcacgaatgaattcacgcgctactccttcttgcaacaattcttccgttacattcgtatctaacataactgtatattgtccgttagtcgtattagagaatcctgattttgcaactttctcaactaacacatcttcagcagttacaactacttcttctcctggtgttgcttcgtaaactgctcttcctgttgatacaaagttttgtacttcttcttgtgataattgttttagccaaccattcactgcattcacatttttaccgaatttcggccccgctgttttaaaattaagcttcaattgatatgatgtgtattttgtttcatcgagttcaacatggaatgcttttacatttaactcatccataacgatatcacgataagattcccaatccatatcattctcgttatgctcaagtaatacaagttctgctagcggctgttttacttttaaagaatgctgattacggttacttcttccaagttcaacaacttgtaaaacagcatccatttccgcttctaatttcggttgaagtagtgattcatttacaactggataatcagctaaatgaacgctgcttccttctaaatttagatgaatgtcttccgcgacaaacggtgtaaatggtgcaattaatttactaattgttacaagcacttcatgaagtgtctcatacgcagctgctttctcagcgttcataccagattcccagaaacgattacgtgagcgtcttacataccagttactcacttcatctacaagtgctgcaatttcacgagctgcattcgtaaattgataatcatcaagtgcagttctcacttttttcgttgtactatgcaatcttgataatacccattcgtctaatttcgtaagctttacatcatacgtttctttcggattatactcatctaaatttgcatataaaacgtagaagctatacacattgactaatgtatctacaaatttagatttcgcttccagtactgttctttcagaaaaacgcttcgcattccacggggcactatcaacaagtaaagcccatcttagcgcatctgcaccaaatttatctactaaatcaactggatctagtgcatttcctttgcttttagacattttctgcccttcttcatctaaaacatgccctagtgataacactcgtttatacggtacttttcctgtatatagtgctgatactgctaataaactataaaaccagccgcgtgtttgatcaattccttctgcaataacatccgctggaaactgctcttcaaataactctttattttcaaatgggtaatgatattgtgcaaatggcatagaaccactatcaaaccaaacatcaatcacttctggtgtacgattcattgtgcctccgcatttcccgcagcacacttgtacttcatctacatacggcttatgcaattccaaatcttctggtgtttctttcgtactatactttcttaattcggcaatgctcttcggtgcgaactgatgattgcaactttcacattcccacacgtttaatggtgttccccaatatctatttcggctaatattccaatccaccatattttctaaaaacttaccaaaacgtccatgtttcatatgatccggataccaagtaacagaatcattattttgtaaaaatgtatctttaattgcagttgttcggattaaccaactttctcctgcataataaagtagtggtgaatcacaacgccagcaatgcggatagctatgttcatatttttctttatgatacagtaaaccttccttcgctaaataacgaacgatatccacgtcacaatcttttacaaatttccctttcaaaaatggtactgcttctgtatactcacctttttcatctacaacgtgcaaaaatgacaatccttcactttgaacaactctataatcgtcctctccatatgctggagcaatatgaacaagtcctgtaccactatctcccgttacaaaatctgctgcaataacgcggtaaccatttgtaacttctttcatcggaaatggcgctgtataagatgtgtttaataattcttcgcctttatgaacagataatacttcatagttctcttttaatacttcttgtacacgttctttcgcaacaatgtatacatgactttcttgttttgctttaacgtattccatatttggatggacagcaagcgcaacgtttgctggaagtgtccaaggtgttgtggtccaacctaaaaaatactcattttcactatctttcactttaaacttcacagttgcacttaaatcttttactgttttatacccttgtgcaacctcatgtgagctcaatgaggtttggcagcttgggcagtatggtgaaactctatgtcctttatataacaatcccttttcatggattgtccccaaaatattccatacactttcgatatatggattccttaaagttacatatggatcatccatatctacccaataaccgatgctttcagtgaattcacgccactgcttttcatatgtgaaaacactctctttacacttttgaataaatggttcaatgccatattcttcgatctcatgtttaccagaaataccaagttgcttctcaacacctagttctacaggtaaaccgtgtgtatcccatcctgcttttcttactactttataaccagccatcgttttatatcttgctactaaatctttaattgcccgaccaagtgcatggccgacgtgtggtaaaccgttcgccgttggtggtccttcataaaacacaaacgattgcgcgccttctcgattctgaattgattgttcaaaaatgctttgttcgttccactgcttacgaatacgtgtttctctccctacagctgactcttttacatctactttcttcatctacaatcactcctttgaatgttttaaaagcacacaaaaaacccgcccctatgaagtagggacgggtttacccgcgttactaccctaattctattagctttttcactaatagcgcttagcaacgtactatcatacgtgttctttgtaacggtagacatccgtccgggcttactcactttcagcctcgtctcctcggagatgattttcaaataacttctgcccaccggctttcagcaatataccggctctctggagaacagttcactattttactctttctcgtcttcagatttgtatactttgttaaaagttattttatgccatttagcaactaattgtcaactaattcaaaatatattcttatccttatctcctattcttatacaattacttttcaaattctcgcaatgctgctaaattttcatcatcctcaataagttcaacaaagaatcccgagtcatcctcacgaaggacaatttcaagctcttccttcgcctcttcatttctatttaactgtgctaaataacaagcacgatcatatcttgctaacaaatcacttgcatccattgttaatacttcatttgttattttttctgcctttagtgtttggccggcaccatgatatgaagacgctaaagaaagaagaattactgtttcatttggatgatgtatagaagcattttctaatacttgaattgcctcttcaaacctttcttgactttgatatatttctcctaaagcaagaaatgctctgcttacaaacggtgtttgctctgttaattgtaagataatcttttctgcttttctttcttcccctgctttaaagaatacttgtgcttgcagaagaagagtatcataatcatctggtagttctcgaaccatttgcttcgttaattccaaagcatctcttaacatatcttcttcctcgcactcaacgaaaagatttacaagttgcttcgctacttcataatcccatttattttctagtgacgtgtgcagaatctctattgcttctttattcatctctacattctcataaaatagcgcaaatcgctgtgctgccatactatttttcggatttaactttaaagagatttcatataaatcaattatcatagtaaccattgaaatttctttcgcacgatttttcatacgataaaaagctctcgtaatgatagatcgtttcggctgttcatgcagctggcgttcaatccatatttccgtaaccgcagctgcagcatacatgaatgctgtacttctttctgcttttttcacctttaacgtatgaagaaaatctcgtatgttagacaattttttatgttgctctactgcttttacataaacatcaaatatacgttcattatcaaaatctttttgtattactttcattgcaacttcaattgcttttacatttctttttttcactaatacttttgcataatgatatagaacttctatatgctcaccatctaattgtagcgcgtattcaatctgtgcttgttctttatctatttcattcatcgctccgtacacatatgcaatcgcatctaaacgccatatttcaggtacttcgtctgctaattgctctagttcagtcagcaattcttcctgaagattcatatctactgaaagctgtgctaaatattccatattaatatgcaacggctcttctttcatcgcctgaaccatatgactttgttctttagaacggttttcttctttttcgtatatttccgcaagctgtaaatgtacacctacgaaattcccatcaagctctaaacatgtttcatacgcttgttttgcttccgtcaattgccctaatgccataagtgtttcaccaattcggtaatacggtaatgccgtttccatttgttctatcgccttattatatcttttcatcgcttggccgtactgtccaatagattcatataaaatacctgcataacaaccgtactcacttacttcatttctttctttgtgtaacgttcttaaaaatgctatacctcgttgtacaaattccgttcctttaattcgattcacatattcatctaacgcacttgctacattataatcccttttctttataccattttctaacttagatagtgctactttaaacccttcttcatttccaccaagttcaatttcagcatcccataaaaccattcctgcattcatgaggaaatcttgactcttttcaatttgcttctcaagaccaagaatatattcttttgcttccttatattgttctcttgccatataaacttgtgtaagtccgaagtgagaataaacatcctcatcattttcttctaaagcacgcttatacaatacttctgcttcttccaagctatcattttgaaaatgataatcacctaattttacgtaaagaggtgctttatcatcacaattctcaataccgtttaataaaatttctttcgcactttcctcatccttcaaatcagattcgtatatttccgaaagtttcgtataaatgtaaggtgcattactatccaaatgaatcgctactttaagcccttttattgctaaatataatttccctagttgatgtgcacatctcgctcgttcataccatacatgcgcttcatatttgtactcttttaacaagtcattaaagatttcatatgcttcttcatatctttctaaatctattaatattaaaccgtgatttgttaaagtgaacctttcaggactacgctctaacgcaacttgagagtattgcaatgctttttcagattgatcaatatacatataggataaagctagaaaactccaagcaataggctgatctgcgtctaattgtaacgataaacgaaagcttgaaatcgcttctagataactttcctgttcaaacgcatatcttccgtttattaaatgatataaagcacgattatttttcttctcaacgcttgtcagcatttgctccgctttctctacttcctgaagacgaataaaacactgtgcaccatgcaatttaacaaagtccgagttcggaaacttttccattaacttatcgatacaatataaaataaattctttatctacttcaacatctaagtgctttatcgtatataaccacgtatttggattatcactcgtttcttttaaaaattgtactaggttactaattccctctttgtcatgttcatctaaatgatcagtaagagaaaaaatagatttaaaataacgattttcttcttcacttagaaactctagttgctccttcttttctttcggaacaaacgtgattgctaaacagcctgtataacgatatttttcttgtactttactatattccacaagaactggctctataaagtttggatcttgaacatagaaagcttgcaatgtatcatcatatccagatagaacttgtacgtgtgaagcatgctcaatatctatacttaataaaacaggaattccttcgtcaatcagtctcttataattctcttcattccctttaaaataacgatattcataacctaattcttctaaataagaaacagtatctgaaaacttcgaacctgtcatatcaaaaataaactctgctatttcatcttgtgtacgtttctctccccatatacgcaacgtcatctctaaacttgtcggaacacaataattatccttttgtacaataggaactatcggcaagtgaaccttttttccatccggatttttttctaaattatgatataaagattcttttaaactcttttcttcttttaatagtttttgtaaatctgcaaatttattcattttgtacagcgcttctgcacgtaaatgtacaaagtaagtattataggcatgatatggcagctgagtatttatattatctattaccgctaacatctcttcatattgctctaaatctaataaatactttatcttctcaaaatgaaaatatggtacttgtgggaattttacaatcgcatcattgattaactgtatcgcgcgtttttgttctcctttattcgcatacaattgtgataataaataggtagataactcttcacaatcttcatgctgcatgccagcaataaattgttcttccgctttctcccattcacctgtatgcatataaacgtagccccatttatcaaacactgcgcgcgcactgtactcctctgctttttgcatatacattaacgcttcttcgtttcgtttcatttctaaaagacatcgtactaacgtaaaatatgttttcgctaaaaaatctgcatctatttcttctttacttaactcttctaaagaagattttaacaactgctccgcttcaagaattttccgctcatcaattaactcatcacaatataaagagagcgttctcatatttgggaattttttataagcgtaacgaatgaggaatgaactgtattggtgcataagcccttcatcagtaaggcgaatcaatatatcgaactccttatgcgaaggaatattggcaagccaattcttcacataggataaagtattcgtttcttttatatatgcaatttcattatttatttcctgtaatccatctacaaatctcttgtcttttaaacaagtttctaactgcttaaaatctagcatgcattcacctcgaatttatatttaaactgctacttgcttagattttacacaccatatagtatgtattcaactaaaatctcttataatagatgttattaattaatattattcaaatttataacaaaatatagtaaaaatgattgtttttctccgtattttgtttaattatatggaataacgtaacatgcggttttaatcttgtagaagctgaaattagtacataaaattatatcggcgattttcaaattatatcgaccgattcttaacatatatcagcgattatatgtcgaatatcgacttatcgacattaaacgacaagccttatacatcataccttttaacaaactatgtcaccaaatgtaattttcatattgggagcgtatacaaaagaagaatacacatgaaatattttaaaaaatcgtagttcagcttcatattgagctagcgcattatcatatgttaatcctctggctattaaacgttctacaaattgttgcttatcacccggatcacctgcaatcccctcttcttttaatgattgatacaaatcgtttttatcattgtgatgcatatttgaatctaaaaagttcactttatcgcttactctacattcaatatttttcacacctaattcacttaaatatatcggtattttcatgcctatattgccatctttaccatttctttgcgtatcactttcaaataatttctgcaaaacacctagctgaataaattccgattgtttctccccatctagtaaataagaagccatattagaaatccaatgtggttcaaaacagattatttttccgcctccttttatatacaaaactaaagttctctatataatagccgtattcctacacttttcttaaaatttcaaagcaaaaaagctagtgtatttttaataatacactagctttttatttggaagaaaaatttaacaagtacaatcacaatcaaaacaatccgtacagtctaaatcgtcacaatctgcttttctctttcttttgtttcttttaagataataatacagtagcccaaacaatagtatacaaataacaaaagctattattgcttctgtatacttattttgaatcataaaaccaattccacttccgcctgaaataaaaattagaattaaataaatccagaacatctatgtaaatacctccattactatatatcttaagataatatccatataacactagaggaaatgaataatcccataccattaccgcttaatacaccagtagttattcttagcaaatttgagctacttctccatttccacttttgggtgaacccatcgataagtaacggaatttgagcgaaaaatgatagtatgattgccaaaagaaatgaaggtgtcatataaaaataaattggaaacattaaaataccaataagcatgcctgtacaacgcgcacataaaggtatgtacttttgtagtttaaaaaaactcctatctaatcttctatgacaaggaatttgtaaaataaaagttcgaatcaatatgaatcaccctctctaaaaagattttaattgattttgccaaaaaaatatatattcaataaaaaaacaaaccaggtttatactagacccagtttgtcagtttactactatgttacatctcctcaggtgcctccaccccaagtaaacgtaatccttcttttaatacaaccgtcacagcataaaccaatgcgagtctgctgtctttttcttcgctctcttctaatatacgaacattaccgtaatatttattgaatgattgtgctacatctaatatatatttcgaaataatcgatggctcatttttattgaaagctgcttcaattatttgcgggaatttatttagtaattttacgacactccagctatgatcgtcttttaaagcaaatgtacatgtttcaaattctacactttcttttcttaaaatagaacaagcacgtgcatgtgtgtactgtacgtaaggtcctgtttctccttcaaatttcagcatattttctaatgagaattcgatattatgcatacgctcattttttaaatcgtggaagatgactgcaccaacaccgacttgctttgctacttcttctttctgttttaagtttggatttttctcttcaatattttgttttgcaagttcgattgcttcttcgagtacttcttcaagtaaaataactcttcctttacgtgtcgacattttcttaccatcttttaaaatgaagccaaacggtacgtgttccataccatcaacccaagtatagccaagtttttttaatacggtgaaaaattgattgaaatgtaagctttgttctggaccaacaacatatagcgctttatcaaacccataagtgttttgacgatataaagctgccgttaagtcacgcgttgcataaatcgtcgcaccatctgattttctaattaagcaaggcggcattccttcttcttctaaattaacgactaatgcaccttctgattcttcaagcaactcatgttcttctaaaatcccaataaaatcttccattaaattattataaaatgcttctccctgaaaattagtaaattctacgccgagaagttcatagatgcgagaaaattctttaagggactcatgacggaaccaattccaaagctctaccgcttcttcatcaccttcttctaatttcttaaaccaagcacgtccttcttcttctagttcttcgtcgtcttttacctcttcatggaattggacatataacttaaatagctcacgtattggatcttctttaactactgcttcatttccccattttttataagccgtaattaactttccaaactgtgttccccaatctcctatataattaatccctacaacttcatagccacatttttcagcgatatgtttcagcgaatttcctatcattgtagaacgtaaatgccccatcgaaaaaggtttcgcgatattaggagaggaataatcaattactactgttttttcacagccaaagtggttttgaccgaactcttctttctccgctaaaactgtttttaatactgcatcacttacagtttcacgattgaaaaatacatttacataaggaccaacggcttctactttcgtaaaaaacggattatttaatttctcagcaacttcctttgcgataagagctggtgcttttttatattgcttcgctaatgaaaagcatgggaacgctgcatctccaaattcatcttgtttcggtgtttcaattaaatctaaaatttgtttttgcgttaattcattcgtgaaaatattagataaactttccgcaaactgcattttataatccatgatacaacctccttattttttaaaacacaaaaaactcgtctctaaaaaagagacgagttttaacccgtggtaccacccttgttgttcgttacgaaccactttcccgtttataacgaggacagggggcctcggctttctctactattcgttcaagaagcatctccgaagtgcgcttcatctttttcttccgtactaggctcacaccatccctagctcgctttccttctaaaaaagactactctcttcatcacagacagtatatttaattaattattgcttattatacatcttttcaaacaattagcaagggtgaattacaccaaagtgaaacttagcactttttcttttgtatacataaaaattgtgtttttcaaatctagaactacgaaaataatcttttaaaacgacacgttttctcgccactcgttttgcctccgcaattgtttcatcagtaatatcatgatacaaagcgaagtgttttaatcctttaattccgtcggattctatgacagtttcttcaaacatcggatcaaggtaaacgacatcgtaactattgtcttcacattgcgctaaaaatgaaaaatgctccgtttgctttacttgaattctttgcattgcttcatcaatttcagaaacggatgaagaccatgttttcaaaccattttccataatataagccatatactcattgccttcaagtcctgttacttttccgctttcaccaacaacataactagctacaatactatctgatgccatcccgagcgtacaatctaacactgtcattcctctctctaattgcgtggcttgtacaaacggatcgtgttctccacgcattaaccttttcacacgaaacatcgctgagttcggatgaaagaaaaacgattcttccgtacctttcggataaatagctaatcggttcttccctacgacaagcacatcttgttcatactgctcatgcagcttatgtactggtatgtcattacgtttaacgaatgaacgatttaattctgcggctacctgctttgcataatctgtcatttctttattcgttcttcctgctgttgttacgatcattgtttcacctctatataaagaaaagagggagatttactctcccccttctttagcaattcttttcgaaagcttgttctaagttcgtaataatttcgtccatagttgcaccttcaatttcatgacggtgaatgaagtgaacaacttcttttccttttaataatgccatagatggtgaagatggaggaatttctccgaagtattcacgcatttttgcagtagcatctttatcttgacctgcgaatacagttacaagatgatcaggttgtttttcagcacgaacaaccgcttgacctgctgatggacgtgctaaaccagctgcacaaccacaaacagagtttacaactactaaagttgtacctgatgtattttccataaattctgttacagcttcttctgtagttaactcttcaaacccagaacgcactaactcttggcgcattgggattaccatttggcgcatgtattcttcataagcatttgacatcttgtaatctctccttcaactttcattccaaattcatcatatcacgctctattaataggtgcaaaagaaagataacgatgatttcatttttttgtagggatttcacaaaccccaccgcggcaatgccccactggaacaagttttctattgttagcgatataatcgtatactttacttccaaaaccaagtacgatagatagctttataaaaggaactgcaaaccaataagatggaacggcctttgctaatacatctatgctctgaataccgtcataccacttattatttttaaaaatatacagtctttgttccatcttactttgtagttcttgagaaagctcatacttctcaactacatcttcatttcgaaatgaaacaaatttcatcttaccctttttatctaattttttcgtacgttctgcaacagccgtacacatcggacaccaactatcatagaaaacaatcatacattattcccctttacgtgactccgtcatttgtttccatacagaaccttttgcttcttctccgccttcaatacgctctaatgctagacgtgcttgcatcgctacttcaaactctggatcatcttgcgctgcttttaatgctggaatcgcgctttcatctccaagttcaaataagaacatcgctgcacgccagcgtactaatttacttggatctttcagagatttaatcataacgaacatcgctgccggatcacctacatctgataaacaatctcctgcagtacggcgaacacttacagagcgatctaacaacgctttatataataacggtaatacttcatcaccttttaccatacctaaatacgctgttgctaaacggcgtattgaaactttttcatcatctaacgccatcttcaacactggaatatcttcttcagtaggatccatttgttctaatgctgcaaaacggtttttccagtcagaatctttcatcatctcttctgttactttatatggctcacgcttttggatcgttacttcaacagcacctgcttgatttaataattctttaaccgtttcatttacacgttcttctgaataagcagcaacaatctcttctactacttctttcccgatttcttcaaagttaccgtaacgtgtactttgttccacccatttacgctcttttacaacatttggtgcagacatttgcactttcataattgattctttaaaacgatcaggtaaaccaacacgttcttccgtcgttccatctgttaactttacttgcattggaattgtaaagaacatttgaacaaacactttcacttctccaaaatgagcaagttgttgttcttcactttcttccactacttcttcgccgaaaacagcacgaacttgttgtaataaaactttccagtcatacttcgcatttcgctccactgctaaaaagtcggctacatgatatacacctttaatgccttcaattttcaaaatttcttgcacttgcattggtgcttgttctttattttcatttgtataattattacgtgctcctgatggtaatacttcattcaaaataactttcattgtgtttggacttggcgtcggttcaattgctttaatcttcacgtaaaaaactctcctttattgcatgttcttagctgtattgtaacatgttatcactctatactcctactcggatgcttaattttactactttcttcccactaccatactatttcattctttttacattttaaattaggaacgggattttaaaagctttcgtttccgataatttttattttttatccatttcttgaggcatcgccattatttttgaaaaaaacacgctaaacaaaaaaatataataagctatccatatggatagcttatttacataattttcgttattggaagacaactatttttataaatacaaaaggcagaaaagtatatagattctacaaaatattttgattgtgatacatttacagaatctcttattttataattaatgtcttattattttttggagggaattcgatgaaaaagtttgttttgatatttgggccacaagcagttgggaaaatgacagttggacaagaactagcaaagatgactgatttaaaattatttcataaccatatgacaattgatttattggagccattgtatggattctcttcggaaatgtggcgattaacccatcttttccgaaaggaaatatttcaatcattttcaaagagtgaacattatggaatgatttttacatacgtatgggcgtttaatgaaaagaaagattgggatgatgttgaaagtatatgtaatatttttcgttcccaaggggttgatatttattttgttgaattagaagctgatgtagaagaaagacttcaacgaaataaaacacctcatcgacttgaacataagccaacgaaaagaaagattgaacaatctgaacaaaatttattaagcacatttgaaaattttagattaaattcaaaagaaggagaaattacagagaaaaattatataaggatcaataatacgaatttaaatgctacagaagtagctgaaattataaagaaagaatttcaactatagttttttttaacaaattgaacagttcggattttatgaatatcatatacatttctaattaacataacgtcctattatcggttgcaacaaaaagggattccttactctcagaaggaatccctttttttattttctatcactcgattcatctttttatacattcctatcctgtgatgggttttatggttctcgtttgttactggattagccaaaaaacgttctaaaattttgtatactctttacttattttttcaaaaaagctggcggtatcccctctttaagtttattaaaatactttccacaattttttccgaagctattacttaaaatcaccttttattacgatgccccctcccgccttctctccaaaaaggtaatactctcaatcacaacttcagttctatatattctcttgccttgttcatcatcgtaattactagtctgaatacgccctgtaatcccaacgagcgaccccttcttacaatattcagctacattctcagccgatttgcgccaaacgacacaattaataaaatcgacttgttgttcacctaaactatttcgaaatcctctattcaccgcaacacatattcgtgcataagcgacgccttgttttgtgtagtataattctggctcctttgtcaatctaccgattaatacaactcgattcaatctctgtacttaattatgtgtgtaataacttatttttgttagtattaaaacgttctctttatttctacacattgcttttatgtagaaatagattagaaatatataaacctgtctaaattaattactttttaaacataaaaggtaattaatctatattattataaggataaaacatataacaccatccatatacatagatggtgttatatgtttttataaataggtacaaaatgctctagactggagaaaatcattctattctttatttatataattctttacagtatactagtttcttgtaattcaaaatctaaaattttcttaaattcaccttaattgcttacattccaacaattagttctccttcatttgtaactaaaattttcatttcttttagatttatataagcctgtttttctaataatttatatttttctttaggtagaaattttggccctttgataaaactcgcaggacttgcttttaaattttttaacccctttactacttcaggtactatttttaataaataaggagaatctaatggtgctgcatacctatattctaaaatacgatacacagatttctccatctcctcaagacttctagaccatttcccttcacaaatagcatcacaagatgcatatatgacagcataaaacatagcagaaatattatttttcctttgtaaatcaggcaataaagccccttcctttatcgggtctacatgtttggatatttctattaataaatctctgtaatctccggtatatactccggcctcaataaaatcttccattcctgaaatatattcataggtactagatgggaaatatgtttgccccataaaaagtttatttgtactagagaatctctcaattatcttatcccatccctcccagtgaatattgaaaaagtctaaagtggggatgtacgccatagtaccatcatgttcgtatggtactattatagaaatttcagtgtcactagttgtaaaatgatcccatccagtaatccaaacaaccctttcatattcttcatgtttacgctcattaactacacctatatctaaatccttaatttcagataagaccagccttacgtcggttaatatccttatagcctccataattgttatgtgagttcctgggttatgctttgctttattataggatgtccgaagttggtgaagtgtatgtatagacttagaagaaacacctaactcctctaacccatcaattaactcaaagaaattttccctatttcttctacttttgtatactgcttctttaagaaacaattctattgttgatccaatctctttcaaaaaacttttaacgtcatgttctgtatgatgagtactagaaatacctagagcatttgaatatgattcatttacaatatttaccattatttcgatatgtgttctcatactttcactccttaataattcctttatgtatatgctactttattattaaagtctatatttactatacagactacaatctaacaaactatagtacctcgaaactattctatctatacctcttcatgtatttgatgtcactttttcatttacatcaattccccaatacgaagcgtagaagtcattactagaatctgcattaatcataattataaaaatatggttataagctttaaacaaattcagtgtgaacttaatgatgaattaggttttaattatcaggactattcattaagcctttaatttttaaatacaattgtatccataaaacaaaaaaaacgctattctttttgtagaaatttacagaaaggatggcgtttttgtatgaatctttcgattcaggatgagtttcatttatttgctgaggagctacagcgatatctatatccacatattctttaacaactcgcacaggaaacaagttttgtaaaacggaaaagtaagtatggcgcacgagatttggctgctttatgtatctggattaatcaacaggtagcaagcaattctcttactcgattatgtagccaattttatgcaaatgcaaatacagctacatttaagagtccacaaggacttaattaacgtttatattaccaataaatatcccatgggaaattgttccgatggaacaggttcatgctatctactcaatacgttggcaaatagagattgtatttaaaacatggaaatctcttttgggtatcaatcattgtcacaatattaagcaagagcgtctagaatgtcatctttatggacagttaatcgctatttttctttgttcttccactatgttcaaaatgcgacagctgttactacagaaaaaaccaaaagaattaagtgaatataaagcaatttatatgattcaagatcatctgtacttagtatatggagctatacagaaagacacccaagaaatatcaaaaattcccttcatctgtttgacctctacagaaaaacgaaaaaaatcccatagattcgagaaaaagacagtcttctatattttaggtgtcgtttatcagtgtactgtatccaatctaaagcagaaaactgcataatctttaaaaagacatcatatcaaggcttatttggtatgtgtatttttaaaaacaaataaacaaattatcaagcatgtaggcaacaagaacggaatttcatgaaaaactcaccctcagcttgatgggcatgtatggtgaccccttataacaaacagtccatatattactttattttctcttcatagccccttaacatttcataccccgagaacagtaaatcctttaaatattcatcttctaaaaggttatttaacatctctaaattccctatatttttatatacatgtttcaaatctataagggtttcttcacagtacatttggttaattgaattaatataatctttagtaaccgtcttaaattgttcttcaattaaattttgtgatattacaatgctattcatattacccttagacttcttttccaactccctatccaatactttctttaagtaaaaataaaatccagttctgtctctacacatattaattgatttaatcacatttaaactaaaatccgattcatcaaatgcatacagcgatttataaagaatataaatttcctcaatatccaatagaatttcttcacttaataaagattccattctattgcttgttaaaaaataatcttttaatgttgcaggtaactttattttatttatggtgctattcatacttaatttatcatccttctataatattagaatccattctaatattatagactacacgactcgccgtgactatagtctacatgtttaaagattaaaaaatgtacttatgacactatcttaatttatatctttactctgaatcatgactaaaaacatttattcattttcatactaactaatttaatactgacatctatcctataattcttttattagtaaaatatagttttattcttttttgcagactatagtctgtagagttaaagaaatacctcttccaaaattatcttataaatattgggagagtggtttcttgagtattgaacaaacttttggtaatgtcttgcaggagtatcgtcttaattcaaaaatgagccaagaagaattagcgtttaactctggattagacagaacttatatcagtcttttagaaagaggaaaaagaaaaccaacaataaacactttatttgcattagctagagccttaaaagttaatccgtcacagttaattaaagaactagaagaaaaattatcaaatccaaaaatataaaaagaaacaaaagaaaatactttaagtgttttcttttgtttgcctataacatttaaagaataataaaatagtttgatttcagaaggacgaattattaaaataactcctattctacctaaataaacgtagtaagaactatgaaagaatagttaaattaattaaaacaaatctttcattttttcatctttatattcgtctaatactttatactttatttcagttttttcatttatccagcccacgaaccattcttctttccgactacgttcagatatcttttccatatagaaatcccatacaattgctagtttatttaattctaaatactcttctaaataatctgctctaaataacaagtttctttcataccctaaatactgtgcatcaaagacaaccatattttcagtcttgtctttccataccccctcagaaacttgaactagttcaaaaaacttcactaaatcaacatttggtaaaagataactgcatgaagttttttctccagaaacagaatttatatttgcctcccaggaatattcccaaactgaatcttcacactttatattttcaaattcattttcataatacatattcgaaaaagctgggtgccaataatgttcaaatgcaaatatatcatacgtatttttccaggaaacacttatatcttctttattcatagactttaaagcgatgtaattttctttatctttaagcggcaagaaaactgcctttgtctttataaaaaactcatccctatcaatgaagttttttccgttatccctttcttgattaatcaattgtgctaaagatatatatctatgtcccttatactcaataaatatgaaattaccgagacatttaaactcctctctattttgggcccaaattttatttggcttatacggtaaataagattttattaaattacgcgtatttttttctggtgggtgatctaataaactgggatcaatattccttaaagacgactcccatggttcatttatttccttattaacaggatagttatcttttaatttcgctagtatttcatataacgcaatccactggtactttttaccgatacgttctactagattttcgtgcctattatagtatcttagatttttatcataattaccatgcaccttttcgtcatatccatattcaataattctcattatagcgatattacttaaatcttgatcatcaaattgatccttccagttatacacttcacgtccaaaaacatatcttccaaaatctccataagccccaatacctcttccatattccgttgtcatagatttaattattgaatcaaatccacaatacccttttcctgatatttgttgcatttcttttaacttgatatctatttcttgtaatgaatatgtttttttataccagctactcgaatatggaggatttattttttcgtatttttcaaggttaataactcctttatttacagcaaataaaataatgcttcttgcataatctctaattaatacgttcggataaacttcatcttgtaaaaagatattagtataaataacgtcaactatttcaactaattgcggtactttatttattcttaaaatcgctccatataagctgatcaataacctttccagaacatatggatcatttacatcaaaaaaccttttaagatcctttaaaataattgaaggttctttcatatatattcttattaatgcagtagtagaaatatctcgcagttttttgtcagtacatgtaaacaaccaaataaaagttgtagataacaattcaaaatttccatactcgaaatgttgaaaacttaaattttgttttaaaagaatctctgcaagtcgcgtaggtacttctgaattaccatttatagatattgtccaacttccatctcttgtaggcatagacatcttgtaaagattctcatgtaaaaattctgcgtttaacggtgattctataatataagactgttttaacaacctttcgtatactaagctttgtaaatctatatctttttgtcttaaacatagatttacccattcaaaggttttgtcatttatattttgtacgtctctccatgaaatccctcgaacgaacgcttctgctatattaaaagttatacgctcaaagtcaattaaatctagccattctacttttaatttttctggaataattattgatagactctcataaactccataataaaatgagttatcagatgacaatatattttcaaataagtttttgtcttgttgatatctttctaataaaactagggatatatatatatctgcaaatctctcataagtaaaataaactaggctttcaccataactcctttcattaattgataaaatgttttcttctgctaaacctaaaagtatttctcgatacccaatagtatatggctttgctacattctctattacttcataaagccgctctaattcaatgtcatacctctcactctcaataaattccgaggcgatttctttcaaaattttatctactaaatttagtgaatttacatatgaaaatcttttatcaagtgatagcctaccattaaccttattaatatatttttctaatacttgaactatactccaacctcggaatccaacatactcttcttgaattgcttcacaataaatttgtaagaataggggattataacactcgttttctaaagaagggaatattaccggatttatcttataaaaattaaaaaatgggtccaacgcttccaaacttagattattaaatcccttatgctctaatttatacaacggaaaatcttcttcaatattttcaggtaatatgcttctcagataattactcctaactgataacacgacagcaatattttcaaattctttaataaaatttaaaaaattcatcaaatagcttttccaaaaatgtttaccttctccttcatttaaagcatctattataattacagtttgtttatttttcttctgtgctctgtcattaaattctttaaaaaaggactctttagaacctttgtaatcaatcaaatcaaatagttgtttataaggatgatcatgtgtatttaaatgttgacctaaaaataagaaaacactatgcccaacttcttgcaatcttttagcattgtctgccaataaatgtgatttcccaattcctgcatctccataaatcaatagatacggattgttaattaattgaggttttatcaaatacatataatcattcattgctctttcatgtttggttatttgattgattaaattaatgacttcatttctaatgttttttttagtttcttcattaatcttatatcttaattcctcaacttcttccataaagctattgatttcttctttaaagctcttcaaattattttctaaataaaaccctttatcattataattaatattctttaaatagtttaaaatctcttcaataaaagaaagattcttaaattctatatcttccttatacgtatctaaaaccacatttaaattcataatactatcttgaaacttattaattaacacagtgaacttttcaaaaattagcttgtcacttactaatgaatcaaatacaacatttagatccgtttctacattcgcttctgaattataccttttacctaaatctaatatatttcgatcaagtatttgttctaaatactcatccgtatatttttctaggtaagccctttgttgaatttcatataaatttttttcaaagtattcttttagactgttattactttcaacaatactattttgaacatttgccaaaatactcatttcatttactttaaaacttttgtccctatatccttcaagatatacaatcaactcattaagatattgtgttacaatcggatgagtttctatctcttctagcttcacagattttctataattatttatttcattcattgctatttgggataattgctctacaaaagcatctttagtaaccgttctatatgtagctccaaatacataattaaatatcaaaagcccattcttttcttcattcaaaaacttttgaaatgtatttgaatcaacaaatgtgttttcaaattgcttttgaaatgattttatcttttttagtttgtatttaatcttccatttttcgatgaaagaagtagtcagcaaccctattattttacttattataggttttagaataaatgtaaacttaagcaattttttcactcacacctttttaaattatatttttatgtacctttaaagcggttgccacccatacttaacgacaaaaagacgaattcgttttgaaaaagtttaatcaaaatgaattcgtttctttttggatggactccccttttataaaaaagttaaatcaaaacacacttagaattctttaattgaaagaggcaaactgtcaaaacttattttaaggccacactactcacattatttttcatattcattcacaccaatagagccactattatgtgaaagttctcttggaagagttttaaaaaaactttttactttcttagcatttgtcttattacaataaattacttttcttgttgaaaaacgcatctgatattcattatagaatcttaagtcattcctactaagtttaaaaatagaattatcaggattttcatacgggaagtttttctctctaagaatcaatagatgtttaggtgaaattggcaaacaaaattcattgaacgattgcattgtttttccgctggcgtgtttaatatttaccactggattatctgaaataaccaattcatccatcaccacaactttggattccatttcctcaaattcctctacaactccaagaaaccaatcaaatctatcacttagaagataatatcctaccctatttaaaatcccagaggctaagtgcatcaatagtttttcattatcatccatcttaacttcagcaaaatcaggtatattttccgcaagcatatcgctaaagttttcacttaattctctgaaagcaggaactctaatgctttgtaaagctatgaagaatactaaatctatcctatcctcttcatctaatatttctcttagactacaatttaacaaatttgtttgatcgtttaatttttcattaatttccctaaagcatctagcaaattgagactctaatacagaaaaatgctcttctaaaaattgcttgtcaaaaaaacgagaatcaacagatccgttagcaactttctgttgactttccaaaaactcctcagaaaaatcataaaaatatttttgttgtgcaacattatcaacatgcatattagataagtttttttccaaaactttatcataataatctaccttatcttcatttgcaaaatacttaagataaaaccttggtacataatgctgttttttaaccattccctcacctgttttctaagaaattttaataatctttatatattcattatatcatgttagaattttttagtgattcttataaacaatgcaacgattattaaatactacatatgaataaagaatagcagtataacatcatgctaccatttgtataattaattatttgaattcgcatgattattaatcatttttacatttgatcttaactaatagcaccctttaacgaaaaaaaattccaattaatttttcgttgttttgaatgtgaattagaaattttaatcgtttgccttactataccccaattcctatccaaccgtattttttttgtttactttcaatatgataacgtgaataggccccccccacagttaccacgtttgaaattataggtataaacatggtaggaacagctaaatagtaaaaccaattatctactttttcccacttatccaacttagagatctccttatttgctttcaatatatctgatctgattttttctgctaacttaatatctccattgttcattaaatttttccattcaattaatacctctctaaaccttttaatctcctttttttctcttaaccttaacaaatcatcaattgattctattctaggaatatattgtatttcatccttcatttgaactaaacatagtttatatacttcatgcatattatcaccttctgtttcgttcgatgtacatgatactctttttgaaataaatggtaccttaaattcttcagacattttcataagagagattattgatgataattcaaactccatatcaagcatgtcaaccacaaaaccaggatagctttcttctctttttaataggctatatatataatcaacaggattacctgtatccaaaagtctttctaatggtaaatgtgtgtaattaacagcttcttcatgaagccctatcctccataaattgataaaatcaaatagtccatctacatattttttggctaatcccctttgctcctttaaatgtggctgtcttttttgaaagtgtttaactaaatgatttattaataaaggttttatgttttctcctaactgaatgtcgttataatccacagtattttccacatcgttcaaatacctagattgcctaacaatcccctcgaattttaatttttctagtacagcaaattcacatggatcattcaaatatactttatcaaataatagtattaactctaaacacttcttttctaacaatccatactctctattacttttaaacttatttattaaatctctgtctaattcaccattttcttcaaattctacatatccatttttataagcgtttttaatcaaggcatttgaaaaatgtctgtctaagataattccattatgattttcggccatatttttccatcctcttcgtaaatatgctttaatttgtttggagtaattcatttcataataaactcgattttagtataaaactttttattaaatgttatttttagatagcagcctgcttaatttagaatgccaaaactttaatacctccatcattttaacatatatatccatatcaaaaagggggcaacggtgtatttttttataagcagtcaaatttttttcaaatggttaaattttattttaaatccatatattaaacaactattatattctaaaaggaattcgtgattcgtaaacatttgtatatacagactcttcacgccgaacataaatctctctaaacaactctatcgatatgcaaaaaatcccccttgttaaggattcttcattctctgatatatatcggtgctgcaaagtttttagagttactgtctatagaaacaccagcactatattaagaggtgcactagtgtactgatattatttcctaactcatccgtttgtctaaataacaatttctttatctatgtatgaaaatatcaagggactgatacttatcaatagtatcgcctttttcaaaagatactccctaatttgaacaagttttaaactaatcttagtttcatattctttcaattcttcttcaattttggccgtgtccaattcaaacaacctactaatctacacattagaatacatattagccattttaatttcactaaaatgtttccgtttttataacagtactgttcaatatctcacactaaaacacaacaaaccaacaaatagttttaaacactgaccaaacgaaaattatatctcattaattatttatacttaataaatgttctttaaatattttgaagctcttccactgtaataattcacttacgattatgccggcaaaattttttgggtttttctccccattttgaatctccgttactaatatacaatcatactttgcaggttccattatttttaattgtttaaagacattaatattatgcttttgtctgttagttaattctgtgcctactccacgtataatatcatcaagacccgattcataatgttcatattgatttctagcagccacaattaaatcaagtatacgtaattcttccactcctcgagctggattattccacatgatgtaattatcattatgcattataatcgtgccccttttatttttatccctttgaaaagatatgtcataaggattaccatgaacagtagatatagcttgtttagcaatgtgtagcaaagcaccagaaagaacattgattgaattctctttagccttaaattctaacttaagttttgctagtctacctagcattttttctttttcaatggatgccgatgtagacttatctttagcttcatatatctcgtaatcctctgttaatcctgcaatttctccccatgttaattgtgcttctttttccttctcttttattttcttttccaaaagttcaatattgtttttgtctttcgtaataatatttatgagttctgaaaccgcaaattcaatagattttaaatatgtttccaatttaaacttctccttcactaattgagcttaacctaacatttccagcatccatagatgtctgtaaatacatttaatcactatggttataagtgtatccataccaagcaacatcttcttgctgaaaaacacatatttcatctgggtctaaataatgattatagcttcttagattcatagatctgtactcttgaccttcattatttaagttaaaagctggcgcattttcttgttgctatttttcatcagcccttcttttatacgtataataaccagcataagctcctatgcaaacaccgataagtcccgtcatagtaagctccgaataaaaaagattttatattatttatatagcctttttatcttttaaattctgtatacatcctattgaattatatcaaaatcaggaaattaattgtatatttgaaataaagtttgatcaaaaacacctctcaaaccagcatttcacaatagataaaaagcattcatttcgaaaaaagattaatcaaaatgaatgctttttaaatcacttcctaattttctttattattttatttccatttggaaagtagtaatttatttttgaattctcttcaaaaaacctttctttaatttgcgccaacatattatctttagaaacttttccaggacttaaaataaattcacctgaattccccattaaaagtatactccacccatcttttaccccctcataatattcagggtgctcgctcttaatttcttctagtttttcttcctcttccatagttaactcatctggatttacatatgcatgaatgaaataatccttttgttcttccctaactaatcttccatagtcatttatttcaaagagccaaaatttagatctagatgtttcaaaatttagtatccggtttacctctttagtaccaaatggtggttttctaactgaattaaacagtcctaaagtggaatgaacttgagtcgcctcttgagcacctaaaccagaaaatccatttcctgcactacctatccatttagttctttgatttagctcttttccttcgactctttctctcgtaatttcaaataaatcttgttttactagaggccagaggctactaactatatcatagtcttcatattcttgtggccatttgtcaacataaatcattatcggaattgaatcgtgtcgcaataaatcatgcacatcaaatgtattacataacttaaaacttttactttcaataataattgattcatgtgttacctcaatatgatcagctgacattagtttacttaaataaagaattctttctttagaacttaatctcttaaaactaatattgtttctaatttttaatgtgttagaatttacaaaatcaaagagttgcgttggttcccccagatattcagacaaattaggtaacataaaattattgttttcattttccgataaaatggaataatcaacaaagtcaagaataaacgtggacaatttagaaaaagcataatttaaaatattatccttttgagtattttccattttatgagtatcaaaatattcatcaattttatctaacaaatcttttgcaactcttccttcaaggctttgaatatccttcactaactcatctgaaattgtggtaattgcatttctgtctacagataataaaggacgtttatccccaaaaaagtctatataaatcgaactcgaattattatattccctactataacgataattacttatattctctattattttggtatcactaactactattccatcaaccattatacctgtacttctacttaaaacaggataaacatttaacaaatcagatatattttcttggatattttgcgaaggcaacgccagcggaatttcaaattttatatactttgactccacttctacattaataaaattaacattttcgtatatttgttgaagtttaaccaatttttcaagataacctttattatatctgccatcgtaaatagctttacttaccttttcaaaatctatttttcttaaatcaacaggatgattatttcccattaatttttcagttgcattattatcaaatttaatatatataggaattaacttgttaggactagctaccatctcatatatcttataataaagattatcagaaatatcctttctatatttctctttgtctaactgagccagaaacatagtttcttcaatattttcaatatacttgttatttaatacaagatcatcttgaagataaatttttattaacgttccattacttcctataacttctctatccgcatcttccatatatctataatagaataattcatggggaccgtttatcataaaacttatatactcatcctgtttagaatatgatgattttgtacaaacctcaatctcatttcctaacataaagcaagataaaataccgattccaaattgagaagtaggcttaaaatcagtattccataaagcctgtttttgttgaaattcatttgacttgtaaaaagaatttcctatttttaaaaagtacctctcaataatgtcttttgtcattccaataccgttatccatgcaatataagtacttacgtccatctctaccttcattaattccaaattcgattctaccttcagtaatatccttatttgccaatgcacagcggcatgcatctaatgcattttgatatagttctcttaaacataagtattggtccttatatagacccacccccattaacaactcgattattttaacttgatccaatgtaaatttcatattagggacaggctgaaatttttctgaattataatcaatcccgcttctatttacattatgcgcaagttgcaagtcataaatttgactatcggctttctgattaatatctgacgacatactacctaagaatagatagtaattcgcaatctctttatctatccaatttaaataatcttgaagaaaataatagagttttggattttcaaaataaccggaaaatgatatctctctttgaccttttgcattaaaatccgttaaccaataatctaccccttcttgcttaaccttccaatgtaataaactaatttgattatcaatcattttagatgcctgaagagacttaggcgccctctcatagctaaaatgtattacatccgccaatctcaacattactgttaagaatttgatattagcataatttccatttacgtatctgcttttcacttcataattattgacttctgaataatctaatccatgccctaagcaaatttttgctaaatcctctgcgagcttcccgccccatgttcctcctaaagaatcttgaaatttcgaagttagattcttgcaattcttttccgaaaaaatatgatggttaattcgaataaattcatatcttaagttgaggctctctcttttatattctttgagatctcttatttctctaagtgaacttttgtacccagacctaaaaacctgataattgcgcacctttttagccaagttcgatataaaatcttcttcgttattctcaataaatatataattttttatttttgcaaaatcaccgtaaatagtttgagtattctctaaaataaaatctttagcttcaatgatagaaaaaggtttctttaaatcactattcaaattcatatccaagtcttcatcatataaaggaaattcatgactcccttcaatcattttaaataatttcacttcccattcaggcattgccataccagtatcatgcatatatgccgataatcctaacaaaaagaattcatatccagtaaactggtttgctttattttgagcatctattaaaacaagcatattttgcaagattttttctgaatgtgaaccatcatgaatatcaaaatcaggcaatgtactagtaatatttttcaaatgattaactatatctggtttcagcttttcatatagaacagctaatttttcattatcgtttccattatcttttccatcttttaaaatatcaataaaattcatcttgtcctccactttataattagtttactaaattgaaaattcttgaaatctttctaatatatttttattgagtataaccacgattttaggaaaaatttgtttccttatctttattttagaaaacatcctctttcatgtccatttattgaaaaaaaagatggtacaaaatgtattatatataagtaccgtcaatcattaccttatgctatttattcaaatttatttttcttacctttgtttaaatatcttcctaaaatatacaaaatgtatattcaaattaactgctttattaaaaaagtgacacgtttattaatcaaaaagagatatgaattccttatttagtttactcgataaaatgtaagcactttaaatactatttacaggctacggaaatcatctaaaagtgattctttaagttggcgtttattaatctccacaatcttttccgatttagtattaacaacagagctgttcaaatccaaaaattcatctgctttcaaattgaatatgttctgtagagcttccttaactacagaatcagcttcttctcccactttcattaaatttctaagctttggatttgtaacagaaccatttataaacatctgataaattgtttcttgttgtaactttattttcttttcaagaattgcaataagtgcattttttttaattaatttgtcctttaactcacttaattctttctgtaatacactatagttctgttgacttatctttaattctctttggtaaggaagaagttgtttcaatagttgttttgaatccttaacattctgttgtacaatatcctctatccttggtaaatttacttgaatctgattattttgcgctaatgttttatgaacaacagtattatattcctcaattaattgaaatccccttctttctgatcgaacccaataattatcagatatctcttcatttagccaaggaagccccccttccatataaaggattttcgcatatttacttaaagcaatcttgggaacttcagatttaattcctttctgttttacaaaactcaatataatttttcttatttcatcctctggatattcttttttctttcttcctacctttcccatgttacaaccaaccttcataagttttataaaatttatcgatattctgtaataaatccctcaattgttttgaatttattgctaattcccttgttagattgggatttattttattataagtatcgctaactaatttcagatgtagattaagcaatgttttatataaggtgagcacttcctcttgactctctttcatccatctttcgataaattcccttttttctaaaaattcatcatactcaattctccaatattcgaagcaccggaaacactgtgttttacaatcctttattagtgctgtacaatagccaatctcaagcttgtcccactcctgtttcgaagtttttgctggtgaaaatataaatctttctctaaataattttccaatatgccctgccttgcgtgaactcccattaaaaaaaactgaattttttaacggttgacctgtaagactaaacattttaataagtttagatatccctgaatctgtaagaaaaaactcatgttgttgatagtgacgttgtgagtatattgtatcgtgtccccctaagcgagctatctcaataggatggaacccttgtatcattaaggataaaaatgcaagatgtctagtatcattaggtcttactcggcgttcaaaatcaaagtttaccccattaattctgccctgccttatttctttttccgagtcttctccaatgcttctaactgtaaaattatatggtggtgcagtaattaccttatcataaaactcatgaagaagatccctgaaaatattacatctgaatatatcaggatttctacgtaatatcggttcatttaatatccccttatgtgctctataagataagagagtttcagaatagccgaattcctctgtcatttctacatattctttaaccatggaataaatctttttcgaaatttccaattcatcaattactttttttccaccttgccccctattttttattctaggtaatttgagatagtatctatcatcttttatatatatacaattcctctttaaaagaagaaactctccaattcttattggaattactgatgtcaaatgccaccaaatacgtattggataataatatatatatctctgactatcactatttgtttttataaaaaaatcatttaaaacccatgcaaatttaaggaaatccttaacagtaggaataactcttgttcttggcttaacagacggaatagttgacaaaaaattcagatacccttcttttccttcaaaattatcatagtaattataaaagttaaaaatagctgaagctatagtagctcttactgtttctcctttggacaatattctttgagtaaaatcttctaataatgctattctaaatatatttgtttttatcacttcatctagtacatacttgaaaatagcacttacagtactgaattgatacttaactaataaattagctgcccaacatttcattactattgttaatttttctacttctgatacagaacatccactcaattcttctattaatctactgaaacgaagataaaacatattatctctttcttcatcatataatttccatacattttcgtaaaaattaatttctgtaaacttatttttttctatagtttctaagttttcgatagaaagttccatgctaagttctaattcaaatgcttcatcacttaattcttcaatctcaattatttcactcatgttttctcacctcacctctttgtggaatatatcgtgtaatagaaggtaattgtattaagagagactcaaattcctttttactcatataaaaaaactcatatataacggatccaaactttatttcagcttctttaaacaactttaaatcctttaaaaaaagaattgcatttctttcaaaatctcctttgtatccattcttttcagtatctctaatgaaaaagctgatatgtttgagaatgcgttcagtaatcccggataacgcataaaaattataaatagcaaaaggacaacttatacaattctctcgttctgtatacaaacaattgtctgatgacaataaacactgtacatgtcttgttttagaatgcaacattcccatgtcaagttcattaataatacgacgaatttcctctccatcaaggtctttaataaggctttccacagcgcgttcttgctttgtaagatataataaagcatctgctatcccttctaattttaaatcttttccaaacttatcataaataatgttaatttgatgggttctttcatcaatattttgtgtggatccaaacaaaatgttagcaaatccatctgctataaatccaaaataatctctagtaaaaatttgagtactcagaaaatttatatcttgttgatttatatgaatgtatatatttgtggtttcaatcgacttatgattacgaaggaattttaaaagttctaattcatgcgcaggacctttttgacttttaattaaattataggcaagtgttataaaagttctattcatttttaatgatgaaaatttaaggttttcatctggaaatgtatcaaaaaaagccttataaggataactagtgagctgccgatttttagattgaaaatcaattaacgaatcacttaaaggattaagaattcttgctcttatttcacataaaactgctgcatatgcaataggaaggattaattgctccgaacaataaaaataacgatttgcaccagttttagaatgctttaaattcttaatttgaatcttccttattattttcttggcatcttcaatacttaactcatgattctgaatccactctatactgtcaacaatacctgttccctcaaaatttattctaggaatttgcatacagtcccaatgtctccaagcattatttaaatgtaccaatgtatacaaccaaactgattcatagcgattataaaaggcatttcttgaattattttgtaaagactttaataacacttcttttacgctacttacagctttttctttatgaatatctagattagaaatatatttaaaaaactccataaattcttctaccgtataaatttgcggcgctttcttcttcttactccttctcttatacggactatttatgttactaattgtaaacattttcttttgtaaagcatatccctccatttgatcaatttcccttaaaaatatataaagtatttttttcactttttctttggtattattattaaaaaacatcaaattaagctctttagaggagtacataaataactccttatcaataatcctctcagttaagaccctcgtaacagaaagatactctaacaaccttgcatttttcgaaacaaaattcgaccctgagtaagattctgatttaagccttataaatttaaaccacaatctctctgtttctttacaaaaaccagaaaattccacatcttccgcatttaatctgtacataaaattatcatatatagaccccctatcaagataaaggtttaaatttttattccgtcgctcatattctttaataatgtcctcttttaaatataaatatctaccattaaaatatctaggaattcccctcattaataaaggtatctccattgtctgtatacttatccgaataacatccacgtttatattaaattcattcaaaatttcctgtctagtatagtactttaaccttagctccttatccatttcctctttttccttttttaatgaaaaaatttcttcttttctaaaaaaaacatgtctccctattttctgactgatttttaacaatccttcttctagaagttttttataggtatacacgtttaaatccaataatttaagaacatcattcaatattattaaatccttgttcgatatatttaatcttattttctctcctaatgttttacttctatacttcaaaaaatttctaatatccttcttattgcaaaatgtgaactccctttttcttataaattgtatctttcttatattaaaactattgattacaaatatcgcttgagtatacccaatacctgccatcttcataaattcatttatcgtcacatatttttccaaaacatcaattacttcacgctttctcacatagcgtttcgcatacctatattcctcttgattattcaaggtgaataatgggtatttcagtgttcttaagtatatttgaccttctttagaaagagaaacaaggtttttataatatgcatttaataaagatctgttgtcaaggttttttagtcctacgtacgcccaaaattgctttgtagtaaaatattctttgctaaattttctttcccattgcatatgtttgtttaaatcttctctatgaataaaaaccttttcattcttatattcaactctaataatatttttttctacaagaaaccttagactgttttctgttagcttgtatttcaaatgattcaactcaatatattcttgaaccactatttaatcccccccaattactaatataccgatcatatacctgtctcttattaaaagagtcctcataaaaaccaatatcatccataccctcaccatatacactagaaagaacatttacgtgttcttgtaccttactataagaagttctcttctcgatatattccaatgttgcagttaacgttctatccccccttagattagcaatctcctcaatactcagacctaaatcaataagaaaattggtaaaaacacctctacctatatgcgtggaccaaggaagacctgttaaaaattccaaatcctcgtaacggcgatttattctcagtttttccaaaaaacgttccttgattcttaaaaatcgcttagcatatccagtaccacttaaagctagtcccgtacttttagaaataaataacgccttactttcattacttttaaattgttttttcagcttttctaatcgttctatatgaatgtgataagcctgccatagtttctcatcatctaaaacaaatacttctctaggtctcttgacttgcacatcatacctagatgataagtgcttgaataaatgttcttgattatcttctattactaaccacatcccatcatttcccctaaatcctttttcgtagatagattctcttgtcaaattataaatgctaacttaaatatgtacattaacgcttgaataaatatgtacattttcttcatttcaattaatggaaaaccgtagagtttctatccttaagttgatgggcatgccccttcctcaaggaacgtaaaataagtaggtgggagatgaattggctaaaatgataaactggtgaccccgtatgtagaagtaaaaaagggggaaactattgtataattatcgataatttagggggcgccaaatgaaacataataaagaagtaacacttggggattacgttcaattttcatatcgtaaaaatcataatttgaaattaatgggatttgtggtgaatgttttacaaaatacaattgttgtagatattgcggaaagaatggatatcgaggtagatgattttaggcaagttgtaaagcatggttattataataaagtggttcataagcaaataaagaatagtgtttcataaaaagtgctcctatatatataaatttaggagcactttttatggagagaattttcgcaaagatttttttgtctgaggtataaaattttcataagaaaatacgttttgaagatattttcttatttgttaattaataattttttcaatctttatagctgttatggatttaaaatattattcataaaaatttcacataattttattaaaaagaaaaatactaatacttgttttaatactttacttcgagtcattaaaacaaatttactaactacgaaacaaggaggcatcactgtggacattcgtgaaggattaattccaacagctttaggtacagcagtgacagcagcaggttatgctcttaaacaaactcgtggaactaataaaatgattgcaaatacagtatttggttttggtttagcacacgtcgttttaggtgtaatcgatcttgttgaacatcgtcgttagaacgaaaggcaagcattgatatatgcttgcctttttgggagtacatttattattcatttttcaaaatatgtttgtatgacgtaatcattatcaatgtaattaaatagttacactacaaggaaattagaaagtaaaactgtgagcattgaattttatgaaatgagatggtgatggaatggaattttcttctgaaagtaatacgtatcatgctggtgacattgtttatattttttaccgaaatcctcatactcaagacgtagctaacatacaagctgcagcagttgtaaataatcctgaaagacctaatgaattagcactatttctttacgaaacgtattatccactaacaaatgagatggctatatatgctaccgaagatgaggcaaaccaagcttacacttactattatggtgatatttcagaggggatgttagaatgaataagccatttatgcctaagctcgtatattttgaaccgaaagcattggattatcctttggggaaagagctgtttgagaagttttcaaagatggatgttgaaattcgacatactacttcccataatcaagtaagagatttgccaggggataacgattttcaaaggtatcgagtagcaaaatccacgctggttgttggtgttagaaaaacactgaaattcgatacttccaagccttcagcagagtatgcaattccttttgcgacgggatgtatgggacattgtcattattgttatttacaaacaacgatgggaagtaagccttatatacgaacgtatgtaaatgttgaagaaattttagatgctgctgataaatacatgaaagagcgtgcacctgaagtaacaagatttgaagcgtcgtgtacttcagatattgtaggaatcgattatttaacgcatacccttaaacgggccattgagcattttggagaatctgaatatgggaaattgagatttgttacgaaattccaccatgtagatcatttacttgatgctaaacataacggaaaaacaagatttcgctttagtgtaaacgctgattatgtgattaaaaactttgaaccaggaacttctcccttagctaaacgaattgaggcagcaggaaaagtagctagagctggatatcctcttggtttcattgtagctcctatttacctgcatgaaggctggaaggaaggatactatcatatgtttgaacgcctaaatgctgaattacctcttgatgcacgggatgatattacatttgaatttattcaacatcgttttacaaagccagctaagagagtaattgaaaaaaactacccgatgacaaaactagaattagatgaagagaaaagaaggtataaatgggggaaatatggaatcggaaaatacatttatcaaaaagaagaagaagaggatataaaaaactatctgtattcctatatgaaacagttctttcctaatgcaaaactagaatattttacataaaagaaacgaacaaaattcattatatcatcaatctaaaaaattactcactcaaaaaagtgatattggtcaacaattcgctaataaatcatttgaaaaatttatatacgaaagtcttttatgtaaaaatatgtttcattatgaactgaatcccaacagttaaacagaaaaatacagcggttgtatgaatataagtccggtattgtaccgggctcattctttttaacgttgcatcaattcttttgtgaacatattaatttgaacatgtttaaaaacgaatcatcttttgacaatggtattagcgctttagaaagaactttcataaaaaatggtactaataatccctccaagtattactcccatagtagaatctaataacaaaaatctaattgtttaattagtaattctaatctaccattttttgctgtactatcaactaaagaaacagtaaatggttgttgaaacatattagaaaatcgagcaattaaagacataatattatatttagcaaaagccgatgcaactaaagctaatttcgccccaacaagttgaactccatatcctaaaacttctatagaagtcataagcattaaaaataaaaagatacaaattactttaaaagtaataaactccataatcatacctcttaagtttctataaatacataactcaataattatattaaaaacattcaatattttcattaaaatataaatcaatttctattttataatcaaaaactatactcctttattttgaatgatggcatcaccttttattagaattgtcccttggtttagcaaatgtttttttgtaaataatatatttgttaaaccattaattaagggggactagtatgccgcaggatcgaaaagaagaagtgcaaaacgatacatatgaaggaaaagaggttatgccagataatccacaatatctaccgcgtcacgtgcaaatggagctgcctcccgaattttctataaatcctctttttgcccgcaaaggagaatcagtcgttccgcgctttcacatgcctgatgaaggcatgttaccagaaacagcgtatcaaatcgtccatgatgaaatgactcttgatggcaatgcacgtttgaatcttgcaacattcgttagtacatggatggaacctaccgcagagcacttatatgctaaatcatttgataagaacatgattgataaggacgaatatccacagacagctgaaattgaggagcggtgtgtccgcattttagccaacctctggcattcccccagcccccttacaactatgggcgtttcaacaactggatcgtcggaagcctgtatgctcggggggcttgcgttaaagagacgctggcaaaatgcacgaaaaagagagggtaagccggtggatcggcctaatattgtgtttagttctgctgttcaagtcgtttgggaaaaatttgcgaactattgggaggttgaaccacgctatgtgaaggttagccctgagcatccccgattaaatcctcaaggggtccttgcagccgtggatgaaaatacgattggtgtggtaccgattctcggtgagacttataccggactttacgaaccggttgccgccattgcaaaagcgttggacgatttacaggagagaacgggactggacattcctatgcatgtagatgcggcttcgggcggatttatagcaccgtttcttcaaccagatttagtctgggattttcagttgccgagggtgaagtccatcaatgtatccggacataaatatggattagtctaccctggcttgggttggataatttggcgggaagctgatgatctccctgatgatttaatcttccgcgtctcctatttaggcgggaacatgccgacttttgccttgaatttttcacgtcctggcgcacaagtgcttctacaatattacaattacctgcgtttggggaaaagtgggtactatgatgtccaaagggcttctcaaaaggtcgctctttttcttagcaaggcaattcaggagatggaaccattcgaacttttgtccgatggttcggatattccggttttcgcttggcaactgaaaaaaggttacacattaaactggaacctttatgatttatctcgacaattgcgtgtgttcggctggcaagtacccgcatatccattgcctccagacctagaagcagtgacaattatgcgcgttgtggttcgaaacgggttttctatggatctcgcgcatttatttttgaggaacctcaaacaggccgttgcctttctggattccttggatggacctatgccacatgatacgaaatgtgataatgggtttcatcactaattggggagcagctctcgtcgtcgttaagttgagctcaacacccataacttttcgagctatcgactgggaagaggtacagaaaagctgatggtttcaaccaagggatacatgatgataggtgatgaacaaattgatgcctgagggctttacaatatcaaatcatacgcccagttttcagaaatctattggcttttcttctggtttcgaaagacacaattcaaatctgttgaagagttaaagaaatttgtagctagtatttcctttttgggggtaccattacctgctttaggagttactccaccattacattggattttagcggataaatggggtgaatctattgtattagaatcgacaaggagtagtgactaatagtcctgagtttaattggcatttacaaaatgtaagacaatatataggtcttaaatcgcagccatgcgagggggatataccattaagtgcttttggacaaggttcaggttcaatgggacttaatggagatttcaccctactatcaaggtttatacgggcagcgtatggtaaataaaatattcagggtatagataacgaagaagagggtatatcggtcatttttcgtattttgtaaaattgtgaggttccaaaaggaggagtaataacggaagaagatacattagataatactatttatacaagcgcaacgtgcatggagtctggtacatattattactatatctatgattgtagataaattattgcccttcgttattagtaaccggatagctgcttaacgataaaaatgaatttgccaattttcttgcaaaatgtaacgggtgctctaccgattggatatgaatatacataattaagggattcatgtataaccagtgattatgtaaagcactgacaataattccttgttgtacaattgatttcataaatgcagggatctcttcttgtagaaccgcgatttctcctaaatttaatgcattgccattttgatccaacgattcaaaacttactccgacgggaactacataggcacttggttttccttgaaccaggaccttaaaattgcggtgaaaagacaccgaacaaccaccttgatttattttactctttcctttaagaattgcagcaaattgatcagaaatgaaatttaaattagacataagttcaattcctttctcgtgctaaatttattcatttagaaatttaatttaaaaaatgtagttccttcttttaaagaaaagaactacttataaacaacttttctctaaaataaacaggccgatatgtgcaatttgtaccctgtttattttagaagaaatataaatgctatttcccaacaaacataacttaatgaatcctttctatatatcattataaaaaattcataaagtaggcaattgtacatctttattttatgtaggttagataaatatgtgccttaataagtctgtgctttctttatgaaattcttattggtaattaaacaataaatttaatatattttaatgattgtatagggtaaaacttaatttgttttttcattttctcttttacaattgcttgtggtcctttgttaaaattgtagtaatatattgaactgtatataaagatagatattttaaatttttcatcctaaaataacttactatatctagctaaaaatgttgttttttcaatgaagaagtaaattttgggtgtatggtttattggttatattaagtgttttgttaatgttaaacataactcttattgcacatacatttttttagatcgcaaagaagaatttattcgtctgtcaaattctatgttaactggtaaaacagactaattttagatgaaagattctataataaatctggagaaacaaaaataattgaaaacatttgagcatggagataaaaaacgcttaacgaaggatatttcaaaagagatggagcaaaggattcaaaaatcaatacagcttgttcaaaaaaatataaggtggatgtattagcattaggagaagtatataagcggaataattataaagaatggaagaaaataagtaagaattgggatcaaggtgaaaattattttagtaatgctgacattaatgtttatgttcatctagtaattgaacattcaggctcagctttaccgaagagagtgaaataaggtgatttaagtcgttagcggattagaaatacgctaaacgatattaatgctggttctgcattttcaatcagtgcagacttatgtactttaaacgtgattaataaattatatttggcttattatgatcctttggttagcactagttagagttatagtaaaaatattaagcagaaacgacttatttttaataataagaggaaatatgttactgaaaagtaaggagacaaattattacttttttaaagagtaattaggtccgtacaatgacgcattaaagtgattcataagggattctgaatgctaagagagtgagaatgaattacaaaagaaaggtgcataggcgcctttctttttttgaagggattttttgttacgagttagtacaaaattgggttcagggggtactataaaattttagcttgatggcgatggggtagcatccacgtctatcaacatcactacacctatatttaatactgcgttacgtgccttgaatcaagtgaaaaacaagacccattttgtaaaaactgaaaccaacgttttctaaactgaacttgagccatatctgcatgaacatgggcctccatttttaaagcttctggtataggtctaggatgttgactttctacaataatttgatcctcttttagtactcttaaactaaatttagctaaaatttggtctagtaaagggaagtactttaaaaatgtccttccggtatatcccataattaatgtctcttcttcatcaattggtgtaaacgtaatgtactgaataaatgactcattctcctgtttgccactgtgaagcatccactgatgtgggaatttgtattcaaggtaagcatcaccatttgagaatataaactgatccagtgttccctccagcttataattggttgattcggcttttgtttttctaccaatcgtttttttatgtacataagcaagatgagcaatatccagcacagattcgattgatcgagtaaggtgtgcattccaagtggcgtggaagaaagagagtttaaaaggagtgttctccattacatgaaaagtttgccattcaggtggagtttcctcattatcaggatatatccaaatcaacccaatcttttcttttacagggtatgagagggtatgagcaaatttcgggataggtttattgggttgggatggaattcttacacaagtaccacaactatcgaactcccaaccatggtagggacagactagtttaccatttactacttgtcccagtgataagtcagcgccacgatgagggcagtaaggtgatagggcctgaacttcgtctttttcatcccgatataatacaaaatctttgccagcaactcttttttttactggaatcttttttatatcttttgcataactcacagcataccaattacgtgggaatactctatttatatttagagtcatttattttctccttcttttttattcacctagtagatattagtggtgtctactgtatactgtctattctatgctataaaatattttaaatgttcgtctaaaattaagaaatctacagtttgatcaaatcattatgaaagcctgtataatctctctaaatgtaacaaaaatgactatagtacaatagattttaaaaaggagaatgtcttattttattgaaaattgagatattaagcaatattcctattgctattaaattgaccattaaagaacttccaccaaaacttacaaatggaaatggagtacctgtaagaggaaatagtcccgtaataccacctaaatttacaactgattgcataccaatcatacatcctataccaattgctataaaactgccgaatggatctacacataattgtgcaatttttaaggagcgaagtaccatagtcaaaactcccaccaatagaataaatacaccaataaatcctagttcttcagaaactattgccattataaaatcagtatgtggttccggaagataccctgttttttgtatgctatttccaaatccacgaccagtgattcctccagagccaatggcaataaaagagtttacaagctgatatccatttccttgcgcatcaagaaagggattgaaaatcgtagtaatacgtgtcttttgaactgctgataaactatattgaatcaaataatataaaataggtaaccataaaatagaaccgatggtagttcttttgattagtagatttatatttattcctgaacaaagaaatatgctaaaacctatacctaatattaaaagtgcagatcctaaatttggttgtttaaagataagaaaaaaaattgtagctaaaaaaaataaaagttttccgataccactccagttatttttagcttgttcttgtcgcaatgcaaaaaaacgggctgttacaagtattgttcctaatttaagaaattcagctggctgtattccaaagatccatgattgagcattatttaccacttttcctttccataaaaccataattaataaaaaaatccccccaatcataatacagattgagactattcgttttttccatatttcatatgggagtaaagcacaaattattaatcctattgttcctaaaagtagctttgttaattgagaatcaacaaaatgtctactgttataaccgtaatgttggacagcgacaatggagcttgcactatacatcatgataatgcctaaagtacatgttatgaatagaggaaggagcaatagataatcgagttttaatatttttttcattttaatatcctcctgatttaaaacaaaacataatattacatttgttaatgaatagaatcttgttctcgtcaattactaaatatgacttttgtttagaaagattctatcacttattccctgttttttacgcaaaaatccccctagtatgtaactagagggattcaaaatggcatgactaaataaggcttttcccccctagtagagctttggcactatacaacgtaaagtaatgaaaattcattacttagctatcttaagaagagccttaatccgacaattcctgttctacccattggcgtctttcgacatttttgggcaatagcctgtgtttgcataggagcctcacctaacaggttaagcaatataaattttatgtgtttgtttcgtgtagcaagcataaatatattttttttgcttgtcaagcaaccatattgctaattttatttgttttattgctttatagtcctttgagaaatgatataaaaaaatgtctgtaatcattctgtataagtacatatttttgacttgtagtgtatcgtttgattaagtagtttaaccatataaatttgataaacagtaaagaagattttaatcataaaagaagattttttgtgaatgttctttttgtatacagaatgactaattattcatcttttgttataaagttggaatttgattaaaaataataagtttcatatgttttattacgtttcttcgaattaaatctatttgaattctatgttttttaaggggaattttaaatttataataaaatataatttcattttctataaaagatttttttataaatggaattgaaagtcagttgacaaatattaaattctggtttaaattttgaagtaattcaataaactttgttaggtgaggctcctgtatagagaaacgctgctgcccaaaaatgtcgagagacgccaatgggtcaacaggaacggtcggattaaggcccttcttaatgtagctggttataaaaacctatgctatacagtgctaaaactcaacgagggagtggtatacgatttgatagaaaggcacctctgtgatttcggcagagctgtcttaataatcatttgtttgtattgtgaaaaaacctttactcctttttgagtaaaggtttttctgtttaatgttatttatttttatcttgtctatattcaaaaaggaggtaattctaactaatgaattgattgcaatgtaactattattgctctaataaaaaatttaagacagataaaataaaacaaaaccactcatgaaactctagagtctcccttagcaatatgaggaggagttaacatgaagaaattattaaaggaattacttataacccaaaataacttggatgcagagaaagttttacgtcttccgtcgtatgatattgcgcaagaagtaaaacagttttcaattgaagatcaagtcatattactaaatacgattcctgtattaaaaagctctaaagttcttcaatatatgagtgcagaagaaaaatataatatcttaattcacttatctgaaaataaagctaaaaagttactgaatttacaaccgattgatgaattagtagatttacttctagcggttcatccggaagaacaggctaaattaatggcgtatctagataaaattacaaaacataacgtaaaaaaattaatgactttcaaacctgaaacggcaggaagtcttgttacaagtgattttgttgcagttagaggaaattggtcagtaaaaatgacattgaagtacattagggaacattctgaaaatgtagaatcaatatcttatagttatgttcttaatagtcatggttatcttgagggaatcgtttccatacatgagttattactagcagcagatgaagagatattatctactatcatgatgccagaggtaatttcagtacacgctgaagttgaccagcaagaagttgtaaaaaagctactgaattataatttagcagcaatacctgtcacaacagcaaataataaaatgattggtattataacatttgatgacgtaatgaatgttatggaagcagaagctacagaagatattcaaaagttaggcggaagtgaaccattgaatcaatcttactttgaagctagtatttggagcattttcctaaaacgtctaccatggttattacttctttttgttgctgaggcatatacaggtacagtattaaagtattttgaagacgaaattgaaactgtagttgcccttgctttctttgttccattattagtaggtactggagggaatacaggaacacaggttgtagcaacaattactcgtgcaattggtattggagagttaaaatttaaagacattttccgtgtaatgaaaaaagaatttgcaattggtatgcttcttggacttgcacttgggatagctgggctcattcgtgcttatatgttaggagttggagcagaagttgcgcaagttgtagcaattactttattatttattgttatttgggcttctcttgtagcagctgttttacctttaattctaagaaaattaaaactagatcctgcagttgtttcaggtccatttattacaacatttgttgacggaacaggattaataatttacttcatggttgcaaaaacgttattaaatttataaatatacactaaaaaaacgaaatccggaataagtatgttgccttaattgctaaaacatagtggggaattcaggcatgaggaaatcaaacacttttgtctttagataaataatattttaatggatttattgaatgtaatgaatgctggaggataaaactatgaaacatctaagaaaaatcttcaaacgaattttgcttctattttctattttaatgattattggcgtaggaatactatttggtactagctatggccgagagcttcgtataacaatcgctgggagtatattaacttctcagcatccacaatatgcgaaatatacattcctatcccaaaaggaactagataaactgcaagatagaattaatcatccaaaatggtcaaacagtgatgagcatatttataaaaaaatagtaggaaaaagattagaagaattaaaaaatcagccattagaaattgatgtagaaacaattaaaagtaataaagatagtcgctttcttttcgaaggaaagttagtaacaattagtaatcctttcaatgttaaacttgttagccatcaaggaacacagggtgctaacaggggagaaaaaattagtgtaatggcaaaacgtaatcatgcacttgttgctgtgaatgcaagtggatttgctgacgaaacaggaaggggtggaggaaatgttgctactggaattgtgatagaaaatgggaaagctattgatacaaatatggatagaaatgcccctacaattattacgggattaacaaagtttggtcaaatgataacaggaaattattctacccaacaactgttggataaacaagtcgtttccgcagctggatttatgccacagttaattgtaaatggagaaaaaatgattacagaaggagacggcggttgggggtcggctccaagaagtattatggcccaaaaagaagatggtacaattatgtttctagttattgacggtagacagacacatagtataggagctacgttgaaagagtgtcaagatattctatatgaaaaaggagctataaatgcaatggcaatggatggaggttcttctgctacgctatatttaggaggaaaggttataaattcaccgtctacattatcccatgaagatcgttatttaccgaacgcttgggtggtaacagcaaaccaaaaacaaaaaataaagatgacaattgatgggagaaaaatagataccaaaacatcagatgaatttgatgcgaacatttcaacgaatttatgaattattaaaaatagaacaaatacatgatttttatctcgttagttggaaaattaaaattattttttaaaattagaaattattatttcatattcatgatttgcacaatatcaaacgagagtgatgaggattccaaatttacggaattcttatcactcttttttagtttttggtaaatatggaacaatatccttactttcactgtctattaagcgttaaaacattttttattaaataaattaagaaaggaatcatcatttttaactaagggagaagattgaattgaaaaaattatggatgctgcttttcgtttgtttcgcggttatgttggtaggatgtaataaaaacgaaccgccaaaacaagcatttgaagaatatatcaatttatggaatgatagaaaatttacaaatatgtatgatcatttatcagatcatgcaaaaaaatcaatttctaaaaaagaattcacagaaaaatatcaaaaaatctatgaggggattggagctaaggatttaaaagttaaaatgaaaggagagaatacgaaagataaagagctttttctttttgaagttaagatggataccgatgtaggatcagtttcattcatccatgaagcaaaacttgtgaaagataaagagtcttggaaaatagattggacgccagacttcatttttccaggaatgaaaaaagattacaaagtacgtatgcaaatagagcaaggaaaacgcggagaaatatatgatcgaaatggaaaagggcttgcaacgaatggtaaagcgactgaggttggaattattccagagaaactaggcgaaacagcagcgcaaacgaaagaaatagtagcacaattacttgatatgtctatagaagaggtcgaacaaaagctcacagcaaaatggataaaaccagactcctttgtaccaattggtattttaaaagagggaaccagacagaatgattatattgaattagaaggagtttcatctcacccagtaaatattcgtacgtatccattaggtgaagcagcggcacacttaactggatacataggaaaggtgaatgcggaggagttaaaatcacttcaaaaacaaggttatcaagcagatgatttagtaggtaagaccggtttagagaaagtgttagaaaataaattgcgtggtgaaaagggtggacgcgtatttatagaagatgagaaggggaaagagattaaaaacgtagcaaaaaaagaagcaaaagaaggagaaaatgttacgttaacaattgatgctgcaattcaagaaaaaatctttaatgagatgaaaactgaagcagggtctagtgcagcggtcaatcctaaaacaggtgaaacaatcgcacttgtaagtagccctgcttataatccaaatataatagttagaggagcatcgaaagcccaacgagaagcatggagtaacgactcgaaactaccaatgacgaatcgctttacacaagcatttgtaccaggttccgtatttaaaacgatcacaggtgcaattggtttggaaacaaacacaataaatccgaaggaagaatttaaaattcaaggatcgaagtggacaaaagattcgtcttggggaaattactatgtaacgcgtgtaaaggatgcaagtccaattgattttgataaggcaatgaagtactctgataatatttattttgctcaacaagctttgaaaatgggaaaagatcagtatgtaaatgaatttaaaaagtacggatttcatgaaaaattaccaatcgaatacgaacttcctatttcaatcattgcaaaagatgggataaaaaacgatattcaactagcagacacgggctatggacaaggacaagtactaatgacaccacttcatttagcattaacatatgcaccgattgtgaatgaagggaatattccgtcgccacatcttttaaaagaagcaaaagtagcagggaattggaaagaaaatgtggtttctaaaaagaatcaagagatattaaagagcgcattaattaaagtcattaatgaccctgatggcgcaggaagaattgcaaaggttgatggtgtaacgcttgctggtaaaactggtacagcagaactgaaagagtcgaaagaagcagacggaaaagaactgggatggttcgcagctttcgatgcaaatgcgccagacatgattgttacaatgatgattgaagatgtaaaaggaagaggaggaagtaacgttccaggtgaaaaagtaaaacatgtatttcagaaataatacttaattatatggtgaattttttgactaaatttattacaggtttgcttaactcaaagatataaattggggaaaatatagaacaattaaatttcaaaaaagcattctcgattagaaagaatgcttttttgctgtgattctagaaaagttgacattgttaatggcaaatagaaggagatagcaaattgaaatggacaagtggagtgttacgttaaattcaaaaaacagattttcatgagtagaattttatcattgtatgctttacttgttttttagtagtattattctgcttgaaaaagataaacaatggaacaaatgaaacttgtatcttgtctatatattgaaaccataataaaagtgagggcagtttttatgtttattcaaataagtttgaggtgtggaaatggaacagacgtttattgaaaagtgtaatcatgatgagctggactatgttataaaagactattggcaagatgtatggaattattcatttattattacgaaagatccacacttatcagatgatatcacgcaagatgtatttataaaggtgtttaaaaattggaattcatttcgaaaggagtcatctattaaaacgtggatattaaaaatcacaagaaatacggcaataaactatttgaaatcctcttattttaaaaggatatctttaataggattttttagtgacgataagcaatccctgtcagcagaacaagaattttttaagcaagaagaaatgaatgatgtgtggaaggttgtattagaactacctaaaaagcaccgtgaaataattatattggacgcaaaatatgaattatcttatgaagaaatggctgaaacattaggagtatccattggaactgtaaaatcgagattaagtagagcgagaagtaaggtttcaaaattaataggggagggtagtagtgatgaacaataaacaaaatcctgactggtatagaaaaataaaaaaagggccaatggagaatcgtaaagatgaagaagaatttatttctaaaataaagcagtctatatatgaaaataatgaagtggattttgtaaaacataaaagaccatttcgtaaaaaagcattacctattgtagttgttttggtttgtacaatgttatttttcattgttcaacaaccttggcttgatgataataaatcgccggtacaaagtagtactcaaattaagcctaaaacaaaagatgagtctgctcaagatccatcattaaaacaatttatgaatgaactatatcaaagtacgaactcaaaaaatgaaaataacttgtacaaagcgttaaatgatgaagttctatttaaaggaaagagttataggaaggatgaactgaagtttgatgaagatatctttcatgagttgcaagtcgcccttacaatgggaggagagtttgcaaaagatacaaagcaagtatataaagtaccaagtggattgacagaaagtaaccaaccaaaccaagcgcattttatatatgcaactgttactggaaataaaacgaaaattttagctgaaccaaagagagaatcacaagttttatatgaaatatctaatgaaatggtaaaagcttggattccagaaaaagtgcaaaatgatggatatataaaaatttcgacaattaacggtaatactggatatgtacagaaagagtacgttttaactgatattaaatattcatttatgttcgaaaagaataatgaaggaacatggaaaataataaatatagattctatatggtaaaagaggaaggttcactttaatgaaccttcctctttgtttttattctctttttgaagagtattccagtactctaaaatttctgatgtaacgagagcggcaatgtttttttctgaattactaccaggaataacgacagaaacggcaatttgtggatcttcagtaggagcatatgcaatgaaaagagaatgatttatcattctttcttgctcattcggaaaacctgtaatacctgttttacctgcgacgtcaaagggcaactttttaatttcctctatattttgactcattccaccttgcacgacactccaaaagttcatcgggtaacgatttgaactttctaaaattggtttaaacttttttgtttccttaccgtccggactaataattgcacttacagtttgaggtttatatttatcacctttacttgccaaagttgctgcatattgagcgagttgaagaggggtatgcacttcatttcctccccaagaggcgtttaataaagcggagattccattttcaaacttattagatggatggaattcatattgtccgtcttcttcaaagggtaaatcaatcccggttttagaacgtaggccgaattgcattaaataatctgtccatatatgtgccactttttctatattcccattattttggttgaataggggcagagctacttttgctgtcataaatgtgttagatgaattaatgatagcctgcctcggtgtaatctcccctgttggtgttccaggcgcattcgtaatgttattttgattatcatactgaaaagtacctttatctaaataagtatcttcgggttggaaaagcttttcgtttaatccaattaaaatagtgagtggttttatagtagaagccatatttacataagattcaccatactttaatttttgaattgctttattttgcgaaagagagttaatgttttcttttctagaagatacacgtgtatttaatatatttggatcaaaaactgccgtgttggccatagttaaaattgcgccagtttttgcatcgcttactacagcataaccagctttagcatcaggtattttcttaatttgagatcttaatgcttcttctgctttttgctgcaactcagagtctaaagctagccgtacatctttacctatttgtactttttgaatgtcccataagaactttttattattcaatttaaaaataagagttttacctggttttccttttaaatcattttcatattgcagctcaatcccgctttttccaacagccatatgctttgaattaaggtcattttctacatacccaattacttgtgaaccaatttcgtgtttaggataatatcgaatccattcatctttaattattacattattgggtttgtttttgtttatgaatgcaagttcattctcagttatatgagagtataacggtatatcattcatagtctgctttttacaagattgttgtaattgagattttatgttctctgtagaaatatcatgttgaaactcgcttgaaaattgattaaaaaaagctaatgtgttcgatgtatcttgtttcgatagcttttcatcattagaagtgcaatatagagacttaactttcttatttgtagctagtattacaccattttgatcaaaaatctttcctctttcagctgaagaagttgcgatagtaattgaaatgaagttgatttttaataaaattagtaaaatcaaacctacaatagaaagaaccgcaaaaaatctccatctttttgtatgtaacatataaccctcccttatgtagcctatttcatcttatatttaattattttttttgtaaatgtggaacaactttattgtttaggttgtctattaagtattaaagcatgaagaaaggaataattagcatgaaaatttactagcaagtctatatgtaagtttaataagagtcattatacagtttagcacttctaatgcaagcggcaaaaaaatagagagaaaacaagaagggagagttattaatgccgtagctaaacgaaaaagaatggatgcttacaaggattaagcaaaaaattgaggcgatatttataaccgattagcggtatctaatatataagaaatgcttttagtatttgtagcaatttctgaaaggattaaatggaggatttatgaaagaacaaaaaggcaagaagcagaagacatatatatctattcgattaaatataatgttcctttgcatatttgtactattctcagctattattatgcagctaggaaaggtacaaatcgttgagggagaggcttataagaaccaagtggaaagtagtcaaaatgcaataactagtattccagttccacgtggacaaattttagatcgagaagggaaaacagttgttaataataaatctcttcgcacaattacgtatacaagggtgaagggaattacgagtgaagatattttaaaaacagcaaaagacttggcgaaagtacttgaaatgcctgaacaagatataaataaattaacagatatcgataaaaaagatttttggatgcagttgaattcgaaacgtgcggagacaaagattactaagaaagatatagaaaagtttaaagaaaagggtatagagggaaaagagttagataaaaaaatagaagacttaagacgaggtcgggttacagaggtagaattagcagaattaacagcacaagatttaaaggtgttagctattaaaagtaaaatgagttcaggttatcaactaacaccacaaatcattaaaaaagatgtaacagatgaagagtatgcgcggataagcgaaaatcttgcgaattttccaggagtagatgcaactgttgattgggaacgtaattatgtaaacgataatttatttcgttctgtattaggaaatattacgagtagtgaagaaggattaccgaaagaaaatttagattcttatttagtacgtggatataaccgtaatgatcgtgttggaaaaagttatattgaacaacgatatgaagatgtattacacggcacaaaagaagaagtaaaaaatattactgataaatcaggaaacattgttagcacagaaataatctctaaaggaaaaagtggtaatagtttaacattaacgattgatatggaattacaaaagaaagtggaagaaagtatagaaaaaaacttgagagcttttaagagttcagagccactgctcgatcgagcttttgttgtcatgacgaatccaaataacggacaaattttatcaatggcaggcaaaaagattgtagaaaaagaagggaaaatagaggttgaggatttggcattaggaaacatgacaacttcgtatgagctagggtcagctgtaaaaggtgctactttattaactggatatgagacaggggcaatacatccaggagatcaattttatgacgcgccgatgaaatttaaaggtacacaagctaagaaatcgtggaatgtatccggatttggtaatattaatgatttacgggctttacaagtatcttcgaatgtatacatgttccagacagctttaaaaattgcgggggtcaattacgtaccaaatggctcattggatattaaacaaggagcatttgatacgatgcgctattatttcaagcaatttggtttaggtgtcccaacaggtattgatttaccgaatgaaataattggacaaacgagaaaagtagatagtcaacctgggtttttactagatttttctatcggtcagtatgatacgtatacgccgttgcaattagcgcaatatatttcaacgattgcgaatggtggttatagaatgcaacctcaaattgtacaagaaatacgagaacaatcaataaaagaagaggttggcaaagttatacgttccatagaacctgtcgtattaaatcgaattgatatgaagaaagaacatattgatcggataaaagaagggtttagatgggtattccaagaaggtgatggaactggcgtgaaatatttcaaaaacgcgccatataaaccagcaggaaagacaggaacagcccaaactgtatatggtggagatgacccgattggtagaaatgcaaaaggagaacgtatggaatgttacaacttaacgttagttggatatgctccatatgataatccagaagtagcattttccgtagtagttccatggcttcatgatgataaaaatggaattaattctataattggaaaggaagtattagatgtatactttgatttgaaacagcaacgtatacatggtgaagctactagtacaggtagttctaagcaaaattagagtacttttctcagggaagagaccctgttcatataaagccatttataagtaaaaaaatgaaatatgaaataagagatagaggcgtcgtagctactatctcttattttgttaataactctcatactagctataatttttttagtttgtggaacaaatttggttcggtgattgtctattatgtgtacgtataaaaaggtgctaaaaatttggaaggaatgatgattttgaaaaataagaggatgctaaaaataggaatatgcgttggtatattaggtttaagtattacaagcctagaagcttttacaggaggggcactgcaagttgaagcgaaagaaaagactggacaagtgaaacataaaaatcaggcgacgcataaagagttctcacaacttgagaaaaaatttgatgctcgagtaggtgtatatgcgattgatactggtacaaatcaaacaatctcttatcgatctaacgaaagatttgccttcgcatcaacctacaaggctttagcagcaggagtattactacagcaaaactcaattgatacattaaatgaagtaatcacatttacgaaagaagacttagtggattattcacctgttacagagaaacatgtagatactggaatgaaactaggagaaattgctgaggctgctgttcgttcaagtgataatactgcagggaacattttatttaataaaataggcggacctaaaggatatgaaaaagcgcttaggcatatgggggatcggattactatgtctgatcgctttgaaacagaattaaacgaagctattccaggagacattcgtgacactagtacagcgaaagctattgctatgaatcttaaagcttttacggtcggaaatgcacttccagctgaaaaacgtaaaattcttacagagtggatgaaaggaaatgctacaggggacaaacttattcgtgcaggcgtaccaactgactgggtagttggagataaatcaggtgctggtagttacgggacaagaaatgatattgctatcgtttggcctccaaatagagcaccaattatcatcgtaattttatctagtaaagatgagaaagaggcaacctatgataatcaactcattgcagaggcaactaaagttatagttaaggctcttagataataatctctcaattctttatgtaatatcattaaaaataagaacttggaaagcgattctttttagtatgatggctgtaaattaaaatactataaaaacaacgctataaaaaagatcctagtgtgtactagtgtcttttttatgttaccgatttacttcatcttttaatcttgctatttgccatgcagtaagaccccacctcaaaattcaacgaaagaaaagaagttaggtggggccctgctgcccgtaaaagcccgattggtgagggctgattaaagtttcactttataataaccatgttttacaacttgcctagtttcttcaatagcatgtgtttcagcaatttcagcaatatcaactacaatcgtattttgtaagatattaactacacaacctgttaattgtaaggtggagttattacgatagggaaattgtacgtaggaaccaattgtaacattattttttgtctccatatgatacacctcgttgttaaaagttttcttctatgtgaagattcttgcatcatataatacacgaatgaagataaaatacaagagtgaaaagaaagaatatattgaataaattactctcgattaagcgtaatttaaatagttttcacatcataaaaacattgaaaactagagtgtttataaaacttacttattttataaaaaacttaaacaatcctacattatgtatcttgttttaataaagagaaagaatattaattaatggaatttcactttagttttaggtatattataattgactgaatgagtatattggtcagttagtgctattttgagacttgtaaagtagcactcagtatgtttatggaattgatttcatgaactacggttttgatactgtgtgataggtaagtggacggaaataatttaaactcttgggaggtggaacagccagtagtttctgtgtgcggtctattaacaataatttcatggtgtttaaatggcaaagtggataacgtatttaatagggtaacgcatgattagtagttataagaatccatacatataccgtatacccttcggattaagtataggaagttatagtttgagagaagttacatagtagggtgtaacactaagattaaagaagctgatgtaattataaaatgacaaaaagagaaaaatgtgagaaatgaggaattgagatgggaagtataaggactaaaaatgttaataaattaaaaagaatctcgcaagcaattttaattgttattggagcatttataaccgcgtatggattagaggctgtacttattcctaataatgtctcagatggtggtgtaacaggtataagtatcgttagttctcagttatttgggttgccattaggtcttttaattggatttattaatattccatttgtttggttaggttataaacaaatcggtagaggatttgcaatttattcagttattggtattgtatcacttgcaataggtactgtgattatgcataatgtgcctacaattattgaaggagatacattgctagttactgttgttggtggtgtgattattggctttggtatgggattggcacttcgtaatggtggggcgttagatggaattgatatgttagcggtattgttgtctagaagattaccgtttggcacaagtgatcttatcttgtttttaaatatgttcgtatttatttttgtgtcaacagtattcggtcttcagggtggaattttatcagcgattgcgtactttattgcttctaaagcaattcatattattgaagtaggattaagtggctctaaaacatttaaaattgttacaaaagaacctaaattaatgatagatacaatttgggaacgtcttgggagaaatgcaatctataatgaaatgtatggtggcttttcgaaagaagcttataaagaagttagctgtgttatcagtcgtttagaagagaataaaatgaaggaacttattcatgaaattgatgaaaatgcctttgtcactgtatatgatgttgcggaagtacaaggcggtaactttaaaaagcatgatatccattaaggggattaattaagttaaatattttatacatagttgattattgaaaaagataaaaaactcatcacatatagatagacaactggtatgtactaagatctacaactgcaaggtacatagaactaaaactaagatattcatgcgaactcaaaaagccgaatttccttaacttaggaatttcggctttaatgttatatgatactattagaacagaaccgggcatgttacatcaatggtagtgagtagaggattaggaaatagtatcattccgcaaagaattttgaataggccagagattgtagtcgtgcagttaaattaagctgtacgatttttttatacaaaagtgagtaaagagattttatgtattttgcaggagttaacattacaattttgttaaaaattttctacgttacataaagtaacaaaatttgaccctgattgtttgttatagtgtaaataatcaaaaaacttaaaatttgtcgagtgaaaattgtgataagtaattcatgtaaaaaacttaaaggggtgtacacatgcataaagaatatgaaattgaagaatacacggcgattgaggaacaaatacattattattgtaaatgtttattagtaagtcatcctgatcaaataataaagtatttagaaaaaaggttagaaaaatatgcagaaacattacaatatgcacatttatatcctgacacagttattttaccgttacagcaattagttattgaatattctttagatgttgctagaattcggaagtatatgaatttaaaaacgtaaagtgaaatttatagtttaaatgaaacagagtcgactttaggaaatgaaattctaatgtcgactctgtttcattgtttaatatcgttgattaaacatacatactaatcaatgaagtttgacatataattaagcaagggtaaaataaaagtgagtactcactcattttattggaaaaggaggatgaaatgtgcaacaaccttccattattttacggactgtatcaaaaagttttggaaaaaaagaagtgttacacaatctttcattgcaagttgaaaaagcagaaatttttggttttgttggaccttctggatcggggaaaacaacgctcattaaaatgattgcaggtattaatgaggcaacgaaaggtgaagtgcttgttaataatactaatatgcctaatttaaatgaaatgaaaagaattggttatatggcccaggcggatgcattatacgaagaattgtcagcatatgaaaatgcagattttatagcaacgatgtatggactaaagggaaaacgtaaaaagacaagaattgcagaggtttttgaacttgtacaattgtcacagtatatgaaaaagcaagtacaacaattttcaggcggaatgaaaaaacgcttatcattagcaatagcgctccttcacgaaccagaaatattaattttagatgagcctacagtggggatagatccgcttcttagaaaaacgatttgggaaaaattttatgatcttaaaaagaaaggcacaacgattattgtaacgacgcacattatggatgaagctgaattttgtgagcgtctagggttaattagagaagggaaactagttgcggttggaacaactgaagaattgaaaaaacgcgtttcatctggacggattgaagatgtctttttgctagaagaggtggtgccatcatgagagttactggtgtaattatacgtattattcgtcaattttttcgagataagcgttcgttagcaatgatgtttggagcgccgatgttattactttggcttttgtcactagtgtttacacagaaagactatataccgcaaattgctgttgttgatatgcccgctcaaatagtaaaagtgatgaaaaatcaagaagcgtcaatttatgaatacagtaaggaaaaggcgatttctgagttggaaaaacaaaaggtagatgcagtatttcgaatagagaatggaaaaatgaaacttctgttggaaggtagtgattcgtcaaaaaatcgtgctgtacttcaagtattgcaaaaaagcacagagaagaatgatgtatcgattatgaaacctgaagtaaattatttacatggctctaaagactttacgatgtttgatgggcttggtcctgtattaattggtttctttacatttttctttgtatttatattatcaggtgtatctttcgtaagagaacgtttaagtggtacgctagaaaggttattatccaccccagtaagaagatgggaaatagtcgcaggttatattattggttttggaatctttgcctttatacaatccattattatcgtaagcttttccgtttatattttagatttatacgtagctggctccatatggctaacgctacttattacatgtatgctctctttaactgcactaacattaggtacgtttttatcggcatacgcaaataatgaatttcaaatgattcaatttataccgcttgttattgtgccacaaatcttcttttctggattgtttccaatggaatctatgaataagtggctacaaatgttagggaaagtatttccactcacatacggcgctgacgcaatgagacaagtgatgattcggaatcaagggtttacagagattgcattagatcttactgtattattacttttttcactattatttgcagtaggaaatgtatttgctttaaagaaacatcgcaaaatataataatgacaaaaaggagctttataaatgcagaaggattggctggaggaattaatagctgcaactaatacggataaacgaaatgaacgtcaaatgcgaatattagaggcggctgttgatatgtttggagaaaaaggatacgcttcaacttcaacaagtgaaattgcaaagcgtgctggtgtagcggaaggaaccatcttccgctactataagacgaaaaaagatttattactagcggtcgtaatgccaactttaactaagttcgttgcaccatttttcgtacaaacctttgcaaaagaaatatttaaatcagagtatgaatcgtatgaaggacttttaagagttgtaattcataatagatttaaatttgctcaaaaacactttcctatgataaaaatattaattcaagaagtaccatttcaaccagaactaaaaaatgaaatacagcaattagtagaaacagaactgttttcacatttcaaaaagttgattgtgaaatttcaagaagaaggagagattattgagataccaccatcttccgtactacgtcttactttatcagctgtattaggtttattattaacacgatttttattattacctgaagaaaaatggaatgatgaagcagaaattgaaaatacgattcaatttatattgtatggattaactccacgaatttaatcgtcgaagtgtgaattacatatattactttttaagtaaaaataaatcgcctttaaaaaggcgatttattttcgttatatatttttgataaataagtacttgtttattaaaaacattctaaatcagcgtgtttctttgtctcttcttctaagacctaataatcctgctagtcctaataaaccaagccaagcccaattattatttctatcacgattatcatttaaatcatttgttgtatttacatttcgagttcttacatcattattaactctgtctaaattattgtcatttactcgagttgaaatatcagtgttattcactctattcatattatttccatcgtattcagcttgcgcagatgtacctaaaaacataatagagagtgctaaaacacttaaaatagatgataatttctttttcataacaattccctcctttcttaatcattaatttctccggagcatctgtgtattattcatttcacaatatctaaaccagtataatagggcgcacatttattgaaaatagagttgaatgattgttaatatattattggatatatatttctcataaaaataaatgaatcaaactttgcttaaaatgttaatcctagtacaatttatagtatacggactagcactaaggaggtaatgagatgcggcaatttgcaaaacctacaatcgtcgtaagtaaatgtttagaatttgatgcttgtcgatataatggagagatgattccagatgtaacaatacgaaatttgcagccatttgttacatttatacctgtttgtccagaagtggagattggattgggaactcctcgtgaaacgatacgaattgtagaagaaaatggtgagaacagacttgtgcaactgtcgacacgagaagatgtaactgaaaaaatggagcagttttcaaatgactttttacaaacgatatcggatgtggatggttttattttaaagaatcgttcaccaagttgtggtacgcgtgatgtgaaaatttattctggttttgaaaaagcgccagcaaagggaaaaggatcgggcttatttggcggagcagtagtaaaaaaattttcgcatcttcctattgaagaggaaggcagattgtcgaattttattattagagagcatttctttacaagactatttacaatcgcatattacaaaatgattaaacataataaaaatatgaaagaccttgtatcgtttcagtcggacaataaatatttatttatggcatataatcaagtgaaacaaaaggaattagggcgtataattgcaaatcacaaaaatgaaaagattgaagttgtatttgaaaactatgagaagactttatatgaattatttatgcgcaccccccgctatacatcgaatgtaaatgtatgcgagcacatttttggatactttaaaacaaagctaaaaaaacaagaaaaagatcattttatagaactgttacaaaagtatgcagaaaagaaaataccacttagtagtttacttacaattctaaaatcatgggccattcgatttgatgaaaagtatttattaagacaaacgtatttcgaaccataccctgaagcattagtagaaatttctgattcgggaaaaggtagagattattaaacaataaattacataattcgacacaaaatctcctatgttgttgtagaacaatgtaggaatttttttgtgcattagtacagaatctgttttaaaattaagttatgacagaattatagcaattgtctaactaatattcttgtcttttaagttgttatgtttgtagtagaaactcgcacgctgtcgaaactcaatattcgataaggggtgtgtagcggaatggaatttactctaactcgcgaaaaacaaatgattaaagaaatggtacgtgactttgctgaaaaggaaatcgcaccgaaagctgtatattatgacaaaactgcagagtttccatatgaaacatttcaaaaaatgggcgaactaggattattaggcatcccattcccagaagagtatggaggttcaggtggcgatactgtatcgtatgcgttagcagttgaagaaattggtcgcgcttgtggtggcactggtttaagctatgctgcaacaatttcattaggtgcttctccaatttattatttcggtacagaagaacaaaaacaaaagtatttagttccaatggcgtcaggtaaaacattaggtgccttcggattaacggagccgaatgctggatcagatgcaggtggtactcaaacgaaagcggtactagatggcgatgagtatgtaatcagtggtgagaagtgttggattacaaacgcagagtatgcaaataccattattgtaaccgctgtcaacggtgttgaagagaatggtagaaaacgcatttcagcatttatcgtacctactactagtgaaggattaacgatttctagtccttacgataaaatgggcgttcgcgcttctaatacttgtgaaatcgtacttgatggtgttcgtgtaccgaaagaaaatattcttggtgatgtaaataaaggttttaaacaatttttatatacacttgatggaggacgtatttcaatcgcagcattggcagttggtattgcgcaatcagcctttgaacgtgcattgcaatatgcgaaagaacgtcaacaatttggaaagtcaatctctaatttccaagcgattcaatttaaattagctgatatggcgactgaagtagagctagcacgcaatttagtacataaagcagcttggttaaaagataatgataaacctttcggcaaagaagcggcaatggcaaaactatttgcatcggaagcagcaagccgtattgcgaatcaagcagtacagattcatggtggatatggttatatgcgtgaatatgaagttgaacgacatattcgtgatgcgaaactattagaaattggtgaaggaacttctgaaattcaacgtctcgtaattgctagacatttaggatgtagataaaagggaggaatcactatgtttcaaaaaatattaattgcgaatcgcggggaaattgctgttcgtattatgaaaacttgtcaaaaacttggcatacgcactgttgctatttattctgaagcagatgaaaatgcccttcatgtgaagatggcaaatgaagcttacttagtaggtggaccgcgtgttcaagaaagttatttaaaccttgaaaaaattattgaaatagctaagaagacaaatgcagaagcgattcatccgggttatggtttattatcagagaatccgtcttttccggttcgttgcaaagaagaaggtatcgtatttatcggtccttcagaagaaatcattacgaagatgggaagtaaaatcgaatcacgtatcgcaatgcaagcagcagatgtcccagtagtcccaggtattactacaaatattgaaactgctgaagaagcaattgaaattgcaaaacaaattggttatccattaatgcttaaggcatccgcaggcggcggaggcattggtatgcagttgatggaaactgagcaaacgctcaccaaagcgtttgaaagtaataaaacaagagcgcaaaacttcttcggtaacggagaaatgtatttagagcgatatatagcagacgcgcatcatattgaaattcagcttttagcagatacacatggtaacacagtgtatttatgggagcgtgaatgttcggtacagcgccgaaatcaaaaagtaatcgaagaagcaccttcaccatttttagatgaaggtacacgaaaggcgatgggagaagttgctgtacaagctgccaaagcacttggctatacaaatgcaggtacagttgagtttcttgtagatgatcagaagaacttctatttcttagagatgaatacgagattacaagtagagcatccagtgacagaagaaattacgggattagaccttgtagaacaacaacttctgattgcaagtggagagaaactatcatttactcaggatgatgtaaaacgtagtggtcatgccattgaagctcgtatttatgcagaggatccgaaaacattcttcccatcacctgggaaaattacagatttaacattaccgtcaaatgtacggattgatcacttcttagaaaatcatgtaacgattacacctttctatgatccaatgattgcgaaagtcattgcacatggggagactcgtgaagaagcaatttcgaaattacatgatgctctagaagaattaaaagtagaaggtattaaaacgaacacgccaatgctactgcaagttttggaagacgaagtgttcaaagagggtatttatacaacaggctttgtaacgaaacaactcgttaaaaaataagatttaacaatattaagggggaaaaaatgatgacgaaagtatacgcatcgatggcaggaaacgtttggaagattgttgtaggagtaggagatacagtagaggaagagcaggatgtcgtcattttggaatctatgaaaatggaaattccaatcatttcagaagaagctggcacagttatgaaaattaatgtgcaagaaggcgattttgtaaatgaaggagatgtattattagaaattgaatagggagatatagggggaagcgaattgaaactacctaattttgctgtcattaaagaagtcgggccacgtgatggcttacaaaatgaaaaaaagattgttggcacaaaagataaagtaaaatggattcaactacttacagaagcaggattgtcgtatgttgaagtttcctcattcgttcacccaaaatgggtccctgcattagcggatgcaaatgatgtattttctgagctaaaaagggatccaaatgttacatatgctgcgcttgttccgaatcaaaatggtttggaacgagcttttttgcaaaatgtagatgaggtgaatgtttttttatcagcaagtgaatctcataataaaagtaatattaataaatcgattaaagaagcattagttgtaattgaagatataacaaaacaggcattattcgaagggaaaaaggtaagaggctatgtttctactgtatttggatgtccttatgaaggggatataagtgtcgcagcagttgacgaattatgtaatcaactattttcatacggcatttatgaagtttctcttggggatacaatcggtgtagcgaatccattacaagtagaacaagtattagaacatctattaaagaagtatgatgcttcgcagtttgccatgcattttcataatacgtatggaatggctctagcgaatgtagttaaatcattagaatacggtattacaacgtttgatagttcttgtggtggactcgggggctgcccttatgcaccaggagcatcaggtaatgttgccactgatgacctagtacatatgctccataaattaggagtccaaacgaatatagacgaagaaaagttattgagagctagtcaatttattcaaagtaagttgaatatccaattaccgagtcatgtgtatagagcgcttcaacataaaacgataagtaggtgagaagatgctacaattacaaaacatttcagttgattatgtaacacctcacgtagtaaagatttcgttaaatcgtgcaagacaagcaaactcattatctttggcattattagatgaactacaaacgatattaactcaaataagtgaagattcaaacgtacgtgtagttattttgactggtgctggtgaaaaagcattttgtgctggtgcagatttaaaagagcgtgccggtatgaatgaagaacaagttcgccatgctgttagtatgattcgcactactatggagatggttgaacaattaccacagccagttattgctgctataaatggaattgcacttggtggtggtacggaattaagtttagcttgtgattttagaattgctgctgaatctgcaagtcttggtcttactgaaacgacacttgcaattataccaggagcaggtggtacacagcgcttaccgagattaattggtgttggtagagcgaaagaattaatttatacaggtagacgtatttcagcgcaagaagcaaaagaatacggtttagtagaatttgttgtaccagctaatttacttgaagagaaagcgattgaaatagcagagaaaattgctagtaatggacctattgctgttcgattagcaaaagaggcaatttcaaatggtattcaagttgatttacataccggattacaaatggaaaaacaagcgtatgaaggtgtaatccatacgaaagatcgaatagaaggattacaggcattcaaagaaaaacgcaaaccgatgtataagggggagtaaatatgttagaccaaaaacaacaatctaattcatttgaagaacgagttgaaacaattaaacaaggcggggcaccgaaatatcatgagcaaaataaagcaaaaggaaaattattcgttcgagaccgtttagcgcttctatttgataatggcgaatatgtagaagatgcattatttgctaactgtgaacaaacaggcttacctgcggatggcgttgtaacggcaacgggtaaaatacatggtcgtactgcgtgtgtaatggccaatgattctactgtaaaagctggatcatggggatcacgcacagttgaaaagattttacgtattcaagaaacagctgaaaaactacgtgttccgttattttatttagtcgactctgctggagcgcgtattacagatcaagtagaaatgttcccagggcgccgcggtgcaggaagaatcttctataatcaagtgaagttatcaggtaaagttcctcaagtatgcttgttatttggaccttctgcagctggtggtgcgtatattccagccttttgtgacgttgtaatgatggtagagggaaatgcatctatgtatttaggatctcctcgtatggctgagatggttatcggtgagaaggtaactttagaagagatgggcggagctcgtatgcattgctctgtatcaggatgcggagatgttttatgtaagacagaagaagatgcgattacacaagcaagacaatacatttcatattttccaaacaactatttagaaaagactccattggttacacctcaagaaccgaaacaattcgataaaacgttagaacaaatcattccagaaaatcaaaatgctcctttcaatatgaaagatctcattaatagagttattgatgagggttcattctatgaagtaaaaaaattatttgctcaagagctaattacaggcttagcacgtattgatggtaagccagttggtattattgcaaatcagccgcgtatgaagggtggcgtattattccacgattcagctgataaagctgctaagtttattaatttatgcgatgcatatcatattccattattattccttgcggatgtaccaggatttatgatcggtacaaaagtagagcgtgccggtattattcgccacggtgcaaaaatgatttctgcaatgagtgaagcaactgtaccgaagatttctatcgttgttcgtaaagcatatggcgctggtttatatgcgatggcaggtccggcatttgaaccagattgctgtctggcattaccgacagcctctattgcggtaatgggtccagaagctgcggttaatgctgtatatgcaaataaaattgcagctttaccagaagaagagcgtgctagcttcattgctgaaaaacgtgaagagtataagaaagatattgatatttatcatttagcatcagagatggtgattgatggtattgttcatccaaacaatttacgtgaagagttaaaaggacgtttcgaaatgtatatgagtaaatatcaagtattcacggatcgtaaacatcctgtatatccagtttaaaagccctatttagggctttcttgctcaaaaagttaaggaggggaaaacattgaaacaagcagtttggtttccaacagaagagtacaaggaaaaaacacgtttatatggttggatgaaatcattgggatatgaagattatgaaactttttataataaatctattgaggaaacagcttggttttggggagaggcagaaaaagcagttggctatcaatggatgaaaccttatacagaagtattagatttagaaaatggtacaccgtttgcacagtggtataatggtggaacatgtaacgttgtagaatcagctttatcccgctggcttgcggatgaagagacgagaatacagccagcacttcagtatgaaggggaaaatggaacttcaaaatcatttacatatgaagagcttgataactgggtaagccgtgttgccaatggtttgaaacacgcgggtattgaaaaaggtgaccgtgtaacaatttatatgccaatgattccagaaacagttgttgcgatgctagctgtaatgaaaattggagcaattatttcaccaatattctcaggctttgcgtctgatgcagttatgacacgtgtgcaagcggcaggttcaaaaatgattattaccgcagatggattttcacgccgaggtaaaattgtttctttaaaagatgaagtagataaagcttgtgaacattgcccaactgttgaaaaagtggtaatcgttcgtcatgcaggaaatgattttacaccacataactatgacttttcgtggagtacgctagaaaaagaaaaaccattcatacatgccgaagaaatgcaaagcgatgatccattaatgctcatttatacatcaggaacgactggtaagccgaaaggaacagtacacacgcatgcaggatttcctttgaaagcagcctttgatgcaggatttggaatgaatattaaacaaggtgatcgtgtattatgggtaactgatatgggctggatgatggggccatttctattattcggttcactcattaatggagcaacgatggttatgtacgaaggtgttccagacttcccagaagcagaccggttatgggagacagttgataaatatgaaattactcatctaggtatttcgccaacgttaatccgagcattaatggcaaaaggtgatgagtatgtcaataaacattctttaaagagtttggaagtattcgcatcaacaggagaaccttggaatcctgatccatggatgtggctgtttgaaacagttggaaaaggaaatgttccaatctgtaactactcaggtggaactgaaatctctggtgggattttcggtaatgttcttattaagccaatcgcaccgattagttttaacgcatctttaccaggaatggcagctgtcgtactggatgatcaaggtaaaccaattcgagatgaagtcggagaattatgcttagagaaaccttgggtaggtatgacgaaaagcttctgggaagatgatgaacgttacgtgaacacatattggtcacgttttgaaaataaatgggtccacggtgactgggtcatttacgatggtgaacaatatatcatcacagggcgttcagacgatacgttaaatattgcaggtaaacgtattggacctgctgaatatgaatctattcttgtgaaacataacgatgtaattgaagctgctgcaattggtgtacctgacgaagtaaaaggtgaagtttgtcattgttttgtagtattaagagatcatgtaacattcacaggagaattaaagaaagaattaatgagtttagtaaactctcatattggaaaagcgttgtgtcctaaagatatccacgttgtagaagatttaccgaaaacacgtaactctaaagtaatgcgccgtgttattaaagcagcttacttaggaaaagagttaggtgatttatcatcgcttgtaaatcctgaagtagttccgtttattcaggggttacagtctagtaaattataaagttagaaaggatctctgtataaatagagatccttttttatgtttataaaaagaaaagaagtgaatttgatgaagaagaaaaattctactattagtgttaagtatgtctgttttatagtttttattaaaatacgatactgtggcatgtttattcattggagtaattaaattttgttaaggatgaaattcaataaaagcgttattttaataggctgttacgaaatttaatttgaaaggcacatccaaatgataaaaaaagagcactataaaatcagtgctctttttattagaaattgcttagttcttaaaaataaaatcattacggacaattcacaatggtaataatgacgctagccattgttccaggagaatcaagaagtgaagcagtaacggttactgttccaggcccattagcggctagaaatacagcggtaaagttacctgaggcattggtaatgacagcaagaggaaccatgaaagcaagagatgggttactaaacgaaaaactgaccactacccctggagtaggaataccgtttactaatacttgacccgaaaaaaataaagtattatttccttgagtggatacacatgctgtggtttcgttagaagtcaaggtaatagatgcaggtccagcaggaagattaaatccagttggtccagttggtccagttgatccagttgatccggttggtccagttgatccagttgatccagttgatccagttgatccagttggtccggttgatccggttgatccggttggcccagtcggtccagttgatccggttaatccagtagctcctgtagaaccggtgggaccggtagggaattgaaaaggttgaacagttggaagtgtaggtccaatagaaccgggattaagtgcagcaaaagataaaaactcgtccattatttatcacctctaaaaatcgtattactaatagtaaatgtaatgatagagcaaagtgaaacggacaagcggttttattttaacaaattaaacaaagtagttatatgatagaaagagagattagtatgattcctttagaaattaaatataaaaaggcgattatcttcaaatcgccttttaggtaatgccgtgtaattttattcagttatttgaaatatagtttcattcggtttggaaaatccatacagtttccttgcgaattttaaaatttcttcttcactacttgttaaagccttgacatccttgttaagggaatgaccatccttctttacagaagataatttttgttgttccgtattaagtgtgatttgtttttctttaatcatttcttgttggttattcagagaatattgaaggacaaaaattataggtaatataaaagccaaagtagttataatacggcgtcttgttttttttatactaccttgttgggtattaggattcacttgctgtgagggtatattaggatttgattggtgtgatgatacttttgggatgtttcccattaaaatgcctccattactgattgtcgaatttaaaccgtttaatagtattataaatgttcaataaggattttagaagatattttaatataggtgagttttgtaaagtttaaacaaaatctttatttaaataaaagaaaccccgcttgtctctggggtttctgaaggcaatgaaagtactcgactaattaaagattccatgaattttttgctgaaaatactggtgaattcgtctgaagtaatgagggcatctaaagctttatacgtacgtgaagtaattaaaaatcgatttataagagttagcttgttttttcttaatagcccacctaatcagtaaagacatatgtctgttgaaatctttacgtgttcattgataaaaagctgattatattcagtcagctttttgtataatacattctagtatttatcggttccaaaagacatattctttcctttaagttggcatcgaaaatattaccaatttttccttttacaatggcaacaaataaagaaacatttacaacgacacttatttcgtttagaactccaatcatcatcacgatgacacttttctttagatttccaccaatcatcattacaatgtttttcctgagaactccaatcgtcatcacaatgacacttttctttagatttccaccaatcatcattacaatgctttttctgagaactccaattatcatcacaatgatgcttttctttagatttccaccaatcatcacaacaatgctttttctgagaactccagcaatcatttttccaggacatttatttctacctcctcgtatgataaagttaggttttttaggaaagggatttacctataaacccgtgattcatttcaattaatggaaaaccgtagagtttctatccttaagttgatgggcatgtaaggtgacccctattagtggtcaaaattttaaaaaaacaaggaggctgtccagacagccccctcgtttttttcgatattctaataaattgcatatacacttacattgaatgggtctgcagcgtttctaggattagcgatataaagtgatctcgctgattctacagttgttctattaccattcaatacagcggaaaaaatgataggatccgtaccactagatacatccttcataacattaaaactaataatatctgggtttcctccatcagttattacccattttaaatattgtgttccaactggaagagattccgtactaaaatttccacttgaacgattgctttgtccttctaaaggagacgtttgtgataaaacagttgcaattaattgttccggcatattaattcctcttttcttaataaatttatattaattttttataacaatgattcaactcaaatatatgaaggattaaataaaataagtattgagaaatattttgtattagggaatcgttttaaaaatgggcttaacgttgtaaatccgcattttcctaacgctccccctaggggaagcgttaggaaccgtgccgtgaagtgtaaagtaatttacagaaaatgtaatacgtgatgcatcgacagttgcaaaaattaacatttatgcaacactccacttgggcttgatttttatggcgccataacgttgcatatattgtgttgcaaattaattttcgataatacggtgatatttgtagcgaaatagaaaatagatatttgcagcactatgaataccttaacgtgctgcaaaatgattacaaaaaacctttttaaaaagtgcaccgtacactttttatccttttactggaatctactttgcacttcccagcacaggtgccccttctagcccttgaaagatcttcaatatatacaaggacacctcgctcaaattgaacgggtaaagaaagcatatcaagagagcaaagtgacctattaactaacgaaagcgtcacttccatttgctcgtttattaaggttattagtatcaatttggccaaacattattccaaagctacattaataaaacacacggcaagcttatgggttaataattaacacacggtcaatttatgcttccgattcggttgaataattagatgattatctacaaaaataagtgttttctggccaacttatgcttccaactgcggccaacttataggtaaaatgacattgtatgatatgaaccataactttgccaggttggcgaggttatggttcttttttgtttctggaaaggttatagttctaaaaatagaatgtatctaattctttggttctttcacttacatcctcaatgtatcttgtgtgttatcccttaatgatcacaattttatcccgtcaaagcccgattggtgaggactgataattagtggggatgaacatctctgtttgattaattaatacttcattttatttgaatctccatatgttttgtgtttttatccatacctattgtaagattatatagagttctcctaataaactgttttaatggattatttaggggttttaaatttataaatcttaaattgttttttcgggataattttttatctaaataatttatattgaagtagaggtgaaccatcggtgaagcaggtgttggtgattaaaaatgaacggtcttcagcaaagaaaatcgtaagcggtttaacgcaagagggccatttcattttaaaacttcacaatgaaaaccaaggtttaaatatagcatatgagcaagattgggatattatcatattggattgggattcattaagtatatcgggaccagaaatttgtagacaaatacgacttgttaaaacgacaccaatcattattgtgaccaacaatatttctagcgaggattgcatagcagggttacaagcaggagcagatgattatattagaaaaccatttgtgaaggaagaattagtagcgagagttcaagctattttaagaagaagtgactataaccagcaaaatgagacaaacttttttcagtttaaagatctctttgttgatgcatctagcaatattgtgaaaaaaggtggcaaaaatctctcgcttacgaagcgcgagtacgatttacttgtatttttaattaagaataaaaatacgatattaagccgtgaaatgcttttgaatcaagtttggggatatgacgtagtagtaaatccgaatgtagtagacttatatattgggtatgtaagaaaaaagctaaagtgcgagaagaaagatagatatattcaaacgatacatggcagaggctattcaatggttgaatgataaaaataagataataaagtagtttctgtgaaatattagttattactgcgcgtattttgtaagggaaggtctctgtcccgtattcgttgagaaagtatttaatgaaggctaatcaacagtcctgaccgcacatattactttttatgcttgattttatgaattgatacgattcacaagattttcacagaattaatgactatactaattaacaggatgttcaaatgaaaatgattatcaatagcgattcaattgaataaaagttactttctaattcaatctatggatgtcatcattttcgaaataaatcacactataaggagtatacatatgaaaaaatctatgcttttaaaattagtgagtattctagcaatttttactttaatgttagtggcttgctcagattcaagtaaagaaacttcgaaggctaataataaagataatggtagtgataagccaaaaacggttgaaatcactgatgctcatggaactgttaaagtacctgtaaacccaaagaatgtagttgctttggataacagaacttttgaaactttatctgattggggaattaaattagcggctgctccaaaggatatcatgcctgctgattcagcatataaaaaggatgaaaaagttcaaaatattgggaatcaccgtgaaccaaatctagaaattattgcagcggcaaaccctgatcttgtaatcgttggtcaaagatttgctgatcattatgaagaaatcaaaaaattagtgccaaatgcagctgttattgatcttaattttgatgtttctgagaaggctactaagcctggagaaaacttagtaaaaggacttaaagattctacaactactttaggtaaaatctttgctaaagataaagaagctaaacaattagtagctgatttcgataaatctattgaaaaggcaaaatctgcttataacggaaaagataaagttatgagtgttatcgttactggtggaaatattggctttgctgcgccgcactctggtcgcgtttggggacctatgtatgaaattttcggttggactccagcattagaagtttcgaattctactgcaggtcataaaggtgatgatgtttctgttgaagctatcgcacaaacaaatcctgattggcttttcgtattagatcgtgatgctgcaacatctgatgcagctaagtcaacacctgctaaggatgttatttctaaatcaccagctcttcaaaacacaactgctgtttctaaacaacaagttgtttatgcaccagaagatacttacacaaatgaatcaattcaaacttatatagagttatttggaaatcttgcaaaaactttagctaagtagtgtaaaggggtacgaaacagtgtcaaaaaatatgatttctagggttgagaatatttctcaaccccagttttataatcacaataaaatatggacaaaaccttttataatagcggttatagttgttataattttagggattatatcactgtttactggagtttatgatatacgtggacaagaggacggaatggagatgtttttcatcactcgtgttccgagaacagttgcattaatgcttactggagctgcaatggcgatggcaggactcgtaatgcaattaattacacagaatcgttttgttgaacctactacaacggggacgattgaatggtcaggcttaggcctgctttttgtgtatttattatttcctgccccaactttagttcaaagaatgactggtgcaatcattttttcttttataggaactatgattttctttctatttttaagaagagttaagcttcgttcgtctttaattgttccgattatcggattgatgcttggagcagtaatttctgcagtgtccacttttttaggactcctttttcaaaagacgcaaagtattgaaacttggtttgtaggttcatttgctaacattcaggtgggaagatatgaatatttatggctgattgttatcattacttttcttatttttatgtatgctaatagattgactttagctggactaggagaagatgtcgcaacaagtcttggagttaattacaatagaattgttctttttgggactgctcttatctctgttgcagttggaattgttgcagctgttattggacacttacctttcttaggattaattgtgccaaatatcgtttcaatgtttagaggtgatgatcttaggagtaatttaccttgggtttgtgtgatcggaatgggatcaataactgcctgtgacatcatttctcgaacaattatacagccttttgaattacctgtttctttaatacttgcaacagtgggagcagtcgtgtttattactattttattgagacaaagaaaaccaaggaggctacgatgatcacattagaatatagaaaaaaagaaaatgtcgaaatcgattctagccttcataatgaaagtagatcagctagcgcttttcggtctaagaaggaagcaagacgttattggattttactcataacattgattgctttaggtcttctttcttcatatggacttttagtttataacaatccagttccgatagattcaccttcttttatcccagtcgttaagagaaggatagtagctattgttgcaatgattattgctgcggtttgccatagcttgtcgacagttgctttccaatctattacgaataataaaattattactccttcacttttaggtttcgaatcactttattcagcaattcaaacgagtacagtattcttctttggtgctagtgcgttaataaattttaatggaattggatcatttttattccaagttgttgttatggtcttcatgagtttgatactttatggatggttactttccggtaaatacgggaatttacaacttatgcttttagttggaattattattggtaccgggctaaattctgtgtcaactttcatgagaaaactacttgcgccttcagaatttgatattttacaagcaagattatttggttctgttaatcatgcagatcctgcatattttcctattgtaattccgatgatcataattgtagcagtattaatttttgctcattctaagaatttgaatgttttgtcactaggaaaggatgttgctacttcttttggagttaaatatcaacctagtgtaatttatacacttgtattagttgctattctgatgtccatttcaaccgctctaattgggccacttactttctacggctttttagtagcaactttgagttatcaggcggcgtcaacttatgatcatagatatattttcccaatggcttttgctataggatttttaataatgacgagcgcatactttttaatgtatcatgtattccatgctcaaggtgtagtttcagttattattgaattatttggtggaattatattcttaactatagttttaaggaagagggctttatgataaaaattgataatgttaaaaagttctatactgataaggtaaaaataggacctttggatattgaaataccaaaagcgggctttacttctttaattgggccaaatggtgctggaaagtccacgacacttttgatgattggtagacttttagatatggatgaaggccaaattcaggtagcaaatatggatgtttctgaatccaaatcaaaagacttagcaaaagttttgactatattgcgacaagaaaatcattttgtaactaggcttacagttagacaattagttggatttgggcgctttccttattcaaagggaagattgactaaagaagatgaggttatcatttctaaatatatcgatttcttagatttaactagtttagagaatagatatttagatgagctttctggtggtcaaagacaaagggcatatgtagcgatggtattgtgccaagagacggaatatgtacttttggacgaacctctgaacaaccttgatgttgctcgttctgttcaaatgatggagcatttaagacgtgcagctaatgaatttggaagaacaattttgactgttatgcatgacataaattttgcagctaaatactcggataaaatttgtgctatgaaagatggacaaattgctgcttttggaacagtagaagaggttatggactcaacacttttgacagatatttttgaaacaaaaatagaaattattaatggtccttatgggccaatcgcagtttattagttataaaatgtgaaaaaataccgtagcttgtgtagattatgcaagctactctagttgaagttgctgtctgtattttataggcagcagcttttttatgtgactactcataaaatgcaaaagaatgcttcaccttttcaagtatgtactaaacgaaaaaaatatccctgtataactttttaaaagaattcagcttgttttttgatatgtaatattgcatatcagagtgtattgataaaagtgtaaggggtcactataatgagggcataaagataaatcacattttcgtagcaataaaaaggaggaaataatatggaaatcgcaatgacagttttaaaatttgtaggtggcgtaatcccgttaattcaagaacttttaaaagcatttatgtaagtttattagttagctatcatttatcgatcattatcatattttactaaaaaagaacggggtgatttttctgaatattaagaaaaacactaaaagaagaaagttccttgcatgtttattagttagtttatgcactattaattattcatctatttccttcgcagaaacacaagcaagtaatgcaactgatgtaaccaaaaatgctagtggcattgatactggtatagcaaatcttaaatataataatcaagaggttttagctgtaaatggtgataaagtagaaagttttgttccgaaagaaagtatcaattcaaatggtaaatttgtagtagtggaacgcgagaaaaaatcacttacaacgtcaccagtcgatatttcaattattgattctgtagtgaatcgcacgtatccaggagctgtacaacttgcaaataaagcttttgcagacaatcaaccaagtttattagtggctaagagaaagcctttgaatattagtatagacttaccgggcatgagaaaagaaaatacaatcactgtccaaaatccgacatatggtaatgtagctggagcagtagacgatttagtatctacttggaatgaaaagtattctacaacacatacgttacctgcaagaatgcagtatacggaatctatggtttatagtaaatcacaaatagcaagtgctcttaatgttaacgctaaatatcttgataacagtctaaacattgattttaatgcggttgcaaatggagagaaaaaagtgatggtagcggcgtataagcaaatattttatacggtaagtgctgaactacctaacaatccatccgacctttttgataatagcgttacttttgacgagttaactcgaaaaggcgtaagtaattcggctccacctgttatggtttcaaatgtagcttatggtagaacgatttatgtaaaattagaaacaacatctaagagcaaagatgtacaagctgcttttaaagccttacttaagaataacagcgttgaaacaagtggacagtataaagatatttttgaagaaagtacctttactgctgtagtattaggcggagatgcgaaagagcataacaaggttgttactaaagatttcaatgaaatccgaaatatcattaaagataatgctgaattaagtcttaaaaatccagcatacccaatttcatatacaagcactttcttaaaagataattcaactgctgctgttcataacaatacagattatattgagacgacaactacagaatattcaagtgctaaaatgacacttgatcattacggtgcttacgttgctcaatttgatgtatcttgggatgaattcacatttgaccaaaagggtaacgaagtactaacacataaaacgtgggatggtagcggaaaagacaaaacggctcattactctacagttatcccactcccaccaaattcaaaaaatataaaaattgtagcaagagaatgtacaggtcttgcatgggaatggtggagaacaattattaatgaacaaaatgttccattaacaaatgaaataaaagtttcaattggaggaacaacattatacccaacagctagtattagtcattaagtataaaacaagcgccctataagtagggcgctttttacttggtcacaaattttattttgtatcggtatgtttttaagttttgtaaatcatcaactataaggtgggaatattgtgcagacgaaaagctacatgtttttcgtctttttgttctcttgcttaataagaaagatcctgtaactcagtacaggatctttaatcaaacgtttttaaaagctaaattgtggtttcatatcacctttataaggttcatgttcaacgaatatagttatatccttaccagcttggtctttaccagttctcttatacgtaaatttattcttatttagttcagtaagttcaagagcagcaccgtatttgttatttccaattgaaacatgggctcttattttattttcgtgtacaacatcgaagtagccataatcaccgcggctttgacctgtttcgctattgaagaactcatatttattagatttgtcatcaaattttgctagacttataaaattcgaattaaactgtgttacatcgttaccagtttcgtctaatacctttgttccgtgccaaagggtaccgcctaaaattttatctccatcaacgtttttaacaatatctcctgtagtcgtgttcagctgcttgtccggatcagtgaaagaaagttctttttctttatatggaacatgttcaacgaaaacttctacatctttaccgttagcgtctttccctattcgtttataagtaaatacatttttatttagttttgtcatgtcaacgacagcttgatacttcattgattctgaaattaatattctctttttcccatcatttgtgataaagaaagttcctttatcgccacgacttgcacctgttttagcatcaaaaaattcatatctgccggacttcgcatcatattttgcaagaccaatgaagtttgcattctcttttgttaagtcattcttatctttgtcatacactcgtgtaccttgccaatttgtctcgctaagaatattagccattttttgccctttagttaatttattttccttttttgtttctttagcaacttgttcttgcttttgtttcccatgattttcttcagctttagtaccagcacaccctgttaatgctaatgtgaatccgagcagtacggatgatagtgcttttgtttttttgttcatgttttatcgtctccttattttatgatttcaagtagtacggttagcgattatagtagcagtgcgtcatatataaacttaattgctacgtttcttatgttaatccccgactataaactgcctctaaataaaacattaaaaaaagataaactaattcctaaatttttttcatacttataaaaaggtcttttacatggggggaatgtaaatttcttattttgaaaatggcgtaatcacattggggtatacacattatgcttacattgcgattttagatgtgatgttatactgtgtataagattttatgtgtgtatgttgtgtcggtttttgtcggtaagttgatatatttcgaaaatcgctgatatatttggagttgcgccgatatatttcgaaaatcgccgatatatttggagttgtgctgatatatttgaaaaatcgctgatatattttggagggggataaaaatgattgtgaaagagcggaaaatgcccgtatatttgctgcaattagaagctttacttagaagattgcctgctcatcatccaaaaaggaatgtggtggttgaaagtctagcgaaatttatggccggctataaaggagagcaggcgattgagtatccgctgagttttctatccgaagcagaataccatattttacatgatattaggttatttgatcaaaaacattatttccaaattgataccctcatagtttcatcttattttcttcttttttttgaaataaaaaatattattggtacattaatttttgatacaaagttcaatcaacttattcgaatagtagatggtaatacggaagaaggattcccagatccgcttttacaactgaaacggcaagagatgcaactgagaaaatggctgaatctacatgatttacataatattccgattgaagccctcgttgtaattagttcccctcgtacaattattaaaacttcagatgaaatactgtctagtaaaattatccacagtgcaaatttacctaatagaataaaacagattaaaaatcaatataaagaaaaagtgattgataatataaatggacttataggccagattatgaatgagcacattccgcaacgtcaaaatgttcttgcgcaatataaaattaaaaaagaggaattgctaaagggtgtacagtgtgaggaatgttttacaatggcaatgttaaaagaaagacagggatggcgttgttcaaattgcaatagtatgtctaaacatgctcatttacgtgctgtacaagattacacacttctgtttagtgtgataactactaatagcgaattgagggaatttcttaatatggaatctagttctgcggttaaaagactcctccaaacaatgaacatcaccttcactggcaataacaaaggacgaatatatgatttaacttctttccaatcgtaattttgctataataaataagtacttatacgaaggggagtctaaagagagtatgaagtcatttaatatcgatcatgttatagctagtgttttgcaatggatattaaatatagccttaattatattatccattgtgttatcaattttcttagtgaatgagacaattacgttcgtgcagtatattttttcggcaaaagagtatacgtcttataaattggttgaaagtatcatcgtctatttcttatacttcgagttcattgcattaattattaagtattttaaatcgaactatcatttcccgttacgttattttatttatatcggaattacggccttaattcgattaattattgtgtctcatgaggaaccgatggagacgttattatacgcaggagcaattcttgttttagttattgctttatacatatcaaatatgagagatttgagaaaagagtagtagtgcagacataagtcagcactacttttttacatcttgaccttcaagttgcttgaaagtttacaatgaaattagggcgtttgaaatcgaaaaaaattgagaaattaagtgaagaggtttcttttacttggaggttataggaatgaatcaggaattgaagttacgtccattagaacgagaagatttaaagtttgtacacgaactgaataataatgcgcatattatgtcgtattggtttgaagagccgtatgaggcatttgtggagctgcaagacttatatgataaacatatacatgatcaaagcgaacgccgatttatcgttgagaaagacaatgaaatggttggattagttgagttagtagaaatcgattatattcaccgtagaacagaattccaaattattattgatccgaattatcaaggatatggttatgcagtggatgcgacgcgtttagcaatggattacgctttttccgtactaaatatgcataagatttatttagttgtggataaggaaaatgaaaaggcagtacatgtttataaaaaagttgggtttatggtagaaggtgagcttatcgatgagtttttcgttgatggtaactatcataatgcgataagaatgtgtatgtttcagaagcaatattttgaaaacaagtagttgaaagattcggaagtaatgttgacgcttcgtaaaaccgtatgctaaaatcctttttaagtattaaggaaggtgcataatatgctttatataaaatttgtaaaactcattagaaaactttgctccgcacaaatgtatacggtgaagcgttgtacggagcttaatcaaggggtataaatcccctatattcatcggctgaataacttttctaaaaaagtatagtgtatctatgcttatttcgttatggtttttcagctggtgtataaaatagattaaggggccatagacaatgctttgtctatggccctttgtgtatattattccgatgagtctttactataaattggagtagtataggaaaaaccacgaagcagagggctagtgtcgaatgacgctatctctctgctttttttaatttcaggaaaagaggaataaaaatgagtttacttaaagtggaaagtttatcacatagttttatagataaagtattatacgaaaatgcttcttttgatttgcataaaggggagcatatgggaattgttggacagaatggtgcaggaaaaagcacattaatgaaaatattggtgggggaaattattcctgataagggagacataaagtggcaacctaatattcaaattggacatcttgatcaatacgcagaaattgatgaggtttataccatttcacaatatttaaagagagccttttatgatttgtatgcaatggaaaagagaatgaacaagttatatgaagaaagtgcgatgactggagatgaaaatcaactattgaaagcggcagaaattcaaggactgctcgaggctcgtgatttttattcagtagatagtattacgaataaggtggcagccggtttaggtattgatgtgattgggatgaatcgtgtgattggtgaattaagcggagggcagcgtgcaaaggtaattttagcgaagctcttattagaagagcctaatattttattgctagatgaaccgacgaattttctcgataaggagcatgtggagtggcttgctaattatttaatgaattttgaaggagcgtttattgtcgtatcacatgattttgattttctggaaaaggtaacttcttgcatatgtgatgtagagttcggaacagttaagaagtattacggcaaatactcagattttgtaagacaaaaggagcatttgcgaaaagattatattcgccaatattatgcacagcaaaagaaaattgaaaaaacggaagagtatattcgtagaaatattgctggggtgaattcaaaaatagcgcaaggtcgtagaaaacaattacagcgtatggaaagaattgcgccaccaagttttactcataaaccgtctattcattttcaggaacttcccatttcagttcagacagttcttgaagtaaataatcttgaagttggttacgacttcgctctcttaccaaagttgaatttttcagtaatgggtgggcaaaaacttgtcattacaggtttcaatggagtagggaaatctactttattaaaaacaatcgttggaaatattgctagtatttctggagagtttcacttttcagagcaaataaagattggatattatgagcaagatttaaattggagcaatgattctttaacgccgcttcaaattatttcagaacagtttcctaaactgaatatgaaggaaatacgccatcatttagctgcgtgtggagtgaaggatacgcacgtttcgcaagaaattcgtacgttaagtggtggtgaacaatcgaaggtgaaactgtgtggattattactatcaccttgtaacttcttaattttagatgagccgacaaatcatttggatgcagaagcgaaggaagctttgcaaaaggcgttaattaagtttaagggcagcattatactcgtatctcacgaagcaagtttttatcttgattgggcagatagcatctttcatatagagacgggattagttaagggggtgtgaaacatatgagtgaaaacaattggaaaacgaaaattatattatttttgaccgctcaaactatttcgttgttcggttcctctctcgtgcaatacgcgattatatggtatatcacccttacaacatcatcaggagtgatgttgactatttcaactgtttgcggttttctaccacaaattgcgatatctttgtttgcaggtgtttggattgatcgttatgaccgtaaaaagatgattatgttatcggatggaattatagcgattgcgacgttagtcttagcaattttatttttaacaggatataaaagtatttggttactttttattgtgttactcattcgttcagctggaacaggagtacaaacgccagctgtgaatgcattaattccgcaaatcgttccgaaagagtatcttatgaaagtaaatggaataaatagcagtattacatctttaattatgtttctttctccagcagcaagtgctgcgattctttctattgccagcattgaaacaacattttttattgatgttattacagctatgattggaattagtattatgtttgtcattcatgtggaaggacatgtgaatgtagaaagtaagcaaaaatctaatctacaaggaattaaagaagggttcacttatttaaaagaaaatgtatttattaaaaggctaatcgttttattgattatcgtcatgattttaataagtccagctgcttttttaacacctttaatggtaactcgttctttcggggccgaaatgtggagacttactgctagtgagatgacctttagtgcgggtgcggcagctggtggcgtattgattgcagcgtggggtggttttcgtaatcgtatgcatacaacagcgctagcttgtgcattatatggactgcttatgattggactcggaatagcaccgatatttattatgtatttagtctttaattttttaattggtataacaatgccgtgcttcaatacaccagttactgtgttattgcaggagaaagtagaaccatcaatgcacggacggatgtttagccttgtacaaattgcgaattcatgcgcgcttcctttaggaatgataatatttggtccgttgtcggatatgtttagtgtagagattttgttaatttatgctgggatattcgtgctattttgcgcaatgtatattgtattaagcaagaggtttgaagtgtaaatatttataatttagaaggtttgcgaagtgatttaagatgctttgcaaacctttttgttgtttgttcagtcaataattatttattgtttaacaataaataattattgactgttaattcttttttagataatatgatggtaagaatctaaggggaattacataagtagaggagaatgtgaaatgaaaaataaatacgtagtagctatttctttcatgattttagcgattatttctttaacgatacatgcttcaaacagtaaagtaggagcggatggatttcttgaagaacctttctttttcctagtaccgataagttatatattgttccttagtggtattggtatattgctatttggatttattacttcaaagctgaaaaagggcaatagatagggacaaaacactcactatgaaatagaaacataccatatggaagaaaaagaataagtgagatgaatcatgatgaatcattatttttataatggtagacaagtaggagctgctattacgctggctggggcacaagggacaattcatgctgtgaatcaagctattcaaatgcagcaacaagcatattttgcacaaatgatgcaaattcagtatatgccgtattcacaacttccgatgcaaattatacattacgatgtacatccagctggtttattttccattccatatggcgggacatatttcttatgaaagaaagcgactcaatagagtcgcttttttatattccgcctaacttcattccaaggaaggcaaaggcgataccaattatgtaagtagcacttaaatataaaaggaagatgtatagttttttacgattgagaagctgaacagattctaatttaaacgtagaaaatgtagtgaatgcgcccataaatccagtacctaataatagttgccagcctgtagtgactccgttgccaattatatacccaagtaaaaatgcccctgttatattaataaggaatgtagcaattggaaattgtgttttatttcttttcttaaaccaattgctaattgcaaatcgtgtaatcgcaccgaaaaatcctcctgttgcgactaataaagcttctatcatgagtaatcaccttctgtaagagatttcttaattaagaaatctccaagtgtatagccaaggccagacataatgaggccaccaagtatgctgcatgatacatataagaaggctatgctccactcagaatgattgatcaattgcacagtttctacactaaatgttgaaaaagtcgtaaaggaaccgatgaatccagttccgatgcctgtgataacctctgaaggtaagatgtttagccgagcgatataagtagttagccacgctaagaaaaagcaaccgattaagttaatgagtaatgttgccaatggaaatgaatgatgccaaaatgtgttgatattaagacctaaataataacgagaaagagctcctaatataccagcaatgccaacgataatataaatcaattttctcacctctttaaatagcttgctcaaaaaaatagactcctaccagtatccatactggtaggagtcattagctaagcagcgtttatggcgaactccatcgcctatgattattacatatagtgtactaaatataccgtttaatttccagtgaggaggagggtgtaacttttctttttttgatgtctgaaggctttttaagtaattaaaatgggatcgattacttatcaactaaatatagtgatatacggttttaattatgataaaatgtttcttatgtgtgtcgttttgttttatttgactgaaaataaagaaaaataaatttgcgtgaaaaggagtcatttatttgaagaaatttttaaaaatcgtatttacatgtgttttagtagtagcgggcattgtaggaggatttctagcttatatgacacttactaaagaacagcctgctgatgttataagcttgaaggtagagaataataaggagcgcgtattagcgactggaaatgagtttaaagttacaacatttaatattggatatgctgggttagataaggatcaagatttctttatggatggtggaaagggatctggttcaagtagtaaagagcaaacggaaactaatttaaagaatatgctttcgtttttacaaaatgagaatagtgattttgcactattacaagaagttgatataaagtcacttcgttcatttgatgtaaatgaacatgaatttttgaaaaaaggattacctgattatgtttcgtcatttggcaagaactacgatacgaaatgggttccagtgccaataacaaatccaatgggatatgcggaggctggattaagtacgttttctaaatacactgttcaagaagcgaagaggttccagctgcctggaatggagccttggccaaagcgtttgtttgatttagatcgagcaattgtggaatataaaattcctgttaataatggaaaacatgttagactcgtaaatttacatttgtctgcttatgatgaaggcgggaaaattagaaaacagcaagtagagtatttaaaagaatatatgaacaagcattatgaaaatggtgattacgtaataatgggtggagattggaatcaattggtttcgaacgctcaattaagtgatccgaagttcgtgaaagagcgtcctgagtggttagtagagttaccgaaggactttacagacggtggctttaaatgggctgtagatccgtctgttatgactgtaagagatgatgtaaagaaatatgtagaaggtgaaaatttcgtcactattattgatggctttatcgtttcaccgaatgtagagattgtaaatgtacaagggaaagatttaaagtttgaaaatagcgatcataacccagtaagtgcggtatttaaactgaagtaattgatatgtataagtagaaggtggggcttcatatggagtggttaaagaggacttgtttttctaaccttgagaaagaatcacagaaaaatcatttattactgtttataacgatttgtagtttcttccttgggataatcgcaattgggtattatggatatatttttacagagagagccatagcattttggatttgtggtatttctgtcgttgcatttggaacgctttttacttttataaaaagtatggaatcagcgtataaatatatcatgacatttatgttgcttacaatgtcttacattatggtacaagcttttaatgaaagcccggctgtatttcaaatggtctattttacattagctgtttcacttatttatttaagcgagcgcctcattttaattattggcggggtagctgttgtgatcacatttatcctttgtagctattggccggagcaattttttgcttatacagcctcatctgaagctgctaatttcgcaagtttgttagcgattgtaacaatcgctatgtggggcgtcacgaaaatcggttctaatctgctccttcgtttaagtgatgagaagcaagaagtaatgagaaaagctcaggagttagaagagacgcaaagacttattgaagaaacagttgtgaaactagatagtaatttcaatcatttaagacaaaatatgaacacgtcgatggaatcgatgagtgaaattaattttgcctttgaagaggtggcagttggtacgcaatcacaatcagagatgatgtatcgttcggtagaagtattgaatgatatggagggaaatattgagcaaatcatctctcaagtaagaactgcatcggctcatgtggatgaaagcttagaaatttcaaaaggtagtgtacatactctaagaaattttgaaactaacatgagaagtttaaatgatgttgtttcacagtctggaattatatttagagatttaatgatgcaatcgaaacaaattaatgaaattgtagatgtaataacgaatatttcaagtcagacgagtttgctagctttaaatgcaaatattgaagctgcgagggcaggcgagcatggaaaaggttttgctattgtagcgagtgaagtgttaaagcttgctgaagaatcaaatcgttctgcgggaagaattcaagggattttgaaggagtttagtaatcaagcaagtaaggtagaagtgcaagtagagaagtcagaaagagtacaagaagaatgtaacgagatgttagcaagtgttttaacaaatgtaactgatttagggaagtttattgatgcgattaataaagtaatgcgagaggttgttgttcatcaagaaagtttccaagttaaaacgacgaatattgtaaaggatgttacgcatgcttctaacgtaattcagcaaacttctacagctacagaagaagtgctagcgagtgtggaagaagaaaaacatcgaaatgatacgtcagtgaagacgttacaaactgttagcgagcaagtgaagttgttagaagatattttagaaaagtaatattgcttagaaagagcacgagtgatgtgctcttttttcattgaaacgaatacttgataggaatttaattgcttttctgcgcgttttctgccaagcttaaggagataaagtgagactagtacatactgattattagccctcaccaatcaagctatccgcaaatagcggaataaaatacttcaaagaaagaattatataggtgacgcatatgatcgaagttaagacttctgaacttagtgatggagaatttaatagaggtgtatttgcaactcgtgatattaaaaagggtgagttgatacacgcagcaccagttatctcttatccgaatgaacagcatgaacatattgagaaaacgttacttgctgattacgcatttgagtatggaatcaatcatacggcaatccttttaggatatggtatgttatttaatcattcatatacaccgaatgcaacgtatgacatcgtttttgagaatcatacatttaacttctatgcttataaagatataaaagcaggagaagaaattttaatcaattataatggtgaagttgataacgatgagctgttatggtttgataaagaaaaagaagagaacgaaaagtaatataaagagtatagaaagagcacattctgtgggatgtgctcttttttattgatgtaaataaagtaaaaagtacaaaaaaataccactttctttttgtgtggtatagtaagatactgagggatagtgttttgaaaaagtcatatattttacaaattgttgtctttctgatgacatgtcaagtttagtagtccatttgggttgctttattatgcaatatatattttaatatgagtggcacctcttataaattaagaggtttataggtgtctcgaattgattttgggtacactgtatccaccactttaggttttttcatgtacgtggggatattatgggcccgtataacgggataaaatgaatatagaaatagaggaatcgtaaaatgaatatgcaagaggtttataaatatttaagtacggtattgcctgaaggacatgttaaacaagatgaaatgttaaagaatcatacgcatattaaagttggcggaaaagcagatgtttttgttgcgcctacaaattatgatgaaattcaagaagttattaaatatgcgaacgaatataatattccagttacgtttttaggaaatggatcgaatgtcattattaaagatggtggaattcgcgggattacagtaagtttaattcatattacaggtgttactgtaacaggaacgacgattgtagcacagtgtggtgcagcaattattgacgtatcacgtattgccttagaccataacttaacgggtcttgagtttgcttgtggtattccaggttcagttggcggagcattatatatgaatgctggtgcatacggcggtgaaatttcgtttgtattaacagaagctgtcgtaatgacaggtgatggagagctacgtactttgacgaaagaagcatttgaatttggatatcgtaagagtgtatttgcgaacaaccattacattattcttgaagcgagatttgaacttgaagaaggtgtacatgaagaaattaaagccaaaatggatgatttaacgtttaaacgtgagtcaaaacagcctctagaatatccttcatgtggtagcgtatttaagcgcccaccaaataactttgctggtaagttaattcaagactcaggactacaaggtaagcgaattggtggagtagaagtttctttaaaacacgctggatttatggtgaatgttgataacggaacagcacaagattacatcgatttaattcacttcgtacaaaagacagttgaagagaaatttggcgtgaagttggagcgagaagtaaggattattggagaggataaagaataacgaaatacgtatgaagatatgaattattttaaaataacatttgggtattgttgacaatttgttttcaattcaatataatggctaataatttaacaagtaacatacgttgaaagagcccagtagcagtttgtcactgttaacgagagagctaggggttgctggaacctagcacaaacaaacttgcgaattacactctggagtatcttaggtaatgctaagcggactagcaatcgatattattgctaagagtggtatgagtagctatgctatttatgcaaactgggtggtaacacggtgaataatcgtccctatgtctatcgtagacataggggcttttttgtttttaaaaaataaaggggatgacaaaagatgaatattattgatgaattagaatggcgcggcgccgttaatcagcagactgacgaagaaggcttacgtaagctagtagaagagaaaaagatttcactatactgcggagttgatccaactggtgatagtatgcatatcggacatttgattccgtttatgatgatgaagagattccaattagctggccatcatcctgttattttaattggcggggcaacaggaacaattggtgatccgagtggacgacaatcagagcgtcagcttcaaacgttagaagtggttcagcataatgtagatgcgttaacagcacaaatgaaaaagctatttgattttggtggaaatagcgaagtgaagatggtaaataactatgattggacacatgaaataaatattattgagtttttacgtgattacgggaaaaactttagcatcaatagcatgttagcgaaggatattgtagcaagccgtttagatacaggtatttctttcacagaattcacgtaccaaattttgcaagcgatggacttccaccatttatacacgaaagaggatgttcaacttcaaattggtggcagtgaccaatggggaaatattacgagtggtttagatttaattcgtaagttagaaggtcatgaggcgaaagtattcggattaacgattccgttattattaaaatcggacggtacgaagtttggtaaatcagcgggtggtgcggtttggcttgatcctgaaaaaacgacaccgtttgaattttaccagttctgggtaaatacagatgaccgtgacgtaattaaatacttgaaatactttacgttcttaacgaaagagcgtattgatgaattagcaacgaaggtagaaacagagcctcataaacgtgaagcgcaaaaagtgttagcggaagaaatgacgaaatttgttcatggagaagaggcgttcctgcaagctgagaaaattacagcagcgttatttagcggagatattaaatcgttaacagctgatgaaattgaacaaggctttaaagaaatgccaacattccagtcttcaaaagagacgaaaaacatcgtagagtggctagtcgatttagggattgaaccatctagacgacaagcacgcgaggacattaataatggtgcgatttctatgaatggtgagaaagtaacagatgtgggtacagatgttactgtagaaaattcatttgatggaagatttattattattcgtaaagggaagaagaactacagtcttgtgaaattaggataataagtaaggctggaaaatatatcggcgatttttcgaatatatcgaccgtaactcaaattatatcggcgattttcgaaatatatcagcgcaaatccgaatatatcagcgattttcccaatatatcgatttaccgacaaaaagcgacaataagaactgttccgaacgggacagctttcattataaaaagtcagtatatttagataaatttaaagggtatataatttttttgacgaataaataagttagagaaaattacggataaaaaatagcccgaaccatgcagggcatgattcgggcttatattcagattagtaagctaagctgaatagacctttaatgtgtgataagtaacgaacgttacttgcttctttcattaatgatgctggtaagcctttaagtggagtattacttgctccaattgtagcaaccgcatctttacgtcctagactagcaagtgttccagagtttacaggtgcgaactcttccaatgctttgccttctagtgctgcgtataagttgtatccaattaactcacccatttgccaagcgatttgtgcagttggtgggtatggacgtccgtctggagcgaagacaacagcgctgtctccagcaacgaatacgtctttgtgagaagtagattgtaggtatgcatcaactgttgcacgtccacggttaacttcaagacctgattcaccgattaatgggttaccttgtacgccgcctgtccaaacgaatgtgttagcaacaagtttttgaccgtcttttaagtcgatttcattgccagcaacgtttgttacaggaagaccagttaagaatgtaacaccgcgtgcttctaggctagtagttgcacgttcgattaagtggtctggtaatactggaaggatttttggacctgcttcaacaagaagaagtttcacttcttttggatttacgccgtggctttttgcaagtttaggcataatgtcagcaagctcaccaactagctcaacgccagttaatccgccaccaccgattacgattgtagcatcagcttcgtttttcgttttcgcgtattcacgaatacggtcttcaacgtgtttgtagattttgtttgcatcagcagccgattttaataccatgctgttttcttctagtcctggaataccgaagtaagcagttttacttcctaaagcaactacaagtgcatcgtaagataaagtagtgccaccagctagtttgatttctttgctatcaactgagaatgactcaactgttgcgattttaagatcgatgtctttccctttgaaaagctttgtaagtggcattgcaactgcttgctcagacacgttaccagctgcaaggcggtgtagttcagtgatgatttggtgtgttgggtattggttaatcactgtaacttgtgcttctgatttgctgtaatatttacgtacgtttaaagcggcaagaagaccgccataaccagcgcctaagatgacaatttgttttgacatagtatgatatcccccgtctttactaattgttgttataagttaaattatttattgttacgttctgcactaatttgaagatatgcgttcacaaagcggaacattttttgtgcttgtggatcttttagtaattttaacaggccgaataggccgataacttcgttgctttcttcagcacgatctttcgcttcgattgcagttgcagccatgcttttcactgtatcttttacaggttctacaagctctgtaattgcaccaacagtgtcgctttttaatacttcatcagtagcaacagtttgagcgaagtcataagacttagttaaaatgttaacaagctcagttaattttggaagctgttctactagtgttgttaatgattcttgtacctcaggttttaacaactgatcaagtacatcaagttgtccttggctagcagaaatttgtacagtttcttgttctggctttgtttgagtcatagtttctggcatctccaattctcctttacgatagcaatactcttattttttataagtaagatagtaaacgtttacgaaactttatacaaagtttcacaaaacacaataaaatgcctttaaatttatgacagcaagtaagctgcaaacataaatctaaaaccataacgtcttacttattatttatgaactgtccgatacatggcttgtccgcataatggaaaagctccgttaccggaaagtgtatataatatatatcctatattatatactatatacacctatgttaacataaaaatgattcctaattatttgatattgagtgtataacgtagtgctgacaaggtatgaaagcgtataaaatattttgttccagttagaaatgtatatacatataaagaaaaaaaggaaaaaatgaacaaattcatgttcgttttttcctttttcctattattcaccttctacaattagcatcgatgtgttaccgcttttttcaagatggcattcgccccaagtacaaagagaatcaagaatggactctaaagaccaaccgtattctgtaagtgaatattctacttttggtggtacttgattgtatacctttctttgaataaccccatcgtcttctaattcacgtaattgctgagttaacattttttgtgtaatcccaggcattaaacgttttagttcactcgttctttttgtgcctttcgttagatgacaaaggataacaaccttccattttccaccgataacctctaaagtcgcttcaacgggaatattatatttcttcatataaaaatctcctttgatgaatgtagatttaagttctccaacaaaagaagctaaataattaaatgttactaaaaagtgcctatagcactttaaagtacgtactttttatcatgttgaatatgttccataatagcatacgtaagagggaaatgagtagtacggtactaaaaagtgcctatgttacttttaggtacctatcgtacttttaagtgcgttcttcaaaaaaagagtaaagccattcataatagcgtatatcaacagtaaagttatttttgtagaagataaaaaggcctttttatcatactattatgattggatttctcgcattaaggaggagttcaattgaattcatatacagtatcttcttcggttatgcagacgaatcggagaagtatgtttgctttattagcactagcaattagtgcgtttggaattggtacaactgaatttattagtgtcggcttattaccatctatctcagaggatttacatgtttctgttacaacagcggggttaactgtttctttatatgcattaggagtagcgtttggtgctccagtattaacgtcattaacagctagtatgtcgcgaaagacgttattaatgtggattatgattattttcattattggtaatggaattgcggcggtagcaacaagttttactgtgttacttattgcgagggttgtatctgcatttgcgcatggtatttttatgtcaattggatctacaattgcggctgcgcttgtacctgagaataaacgtgcaagtgcaatagcatttatgtttactggtttaactgttgcgactattacaggtgtaccaattggaacatttatcggtcaacaatttggctggagggcctcgtttattgttattgtggccattggaatcgttgctttaatcgccaatagtatgctaattccttctaatttaaaaaaaagtacgtctgtatcatttcgcgatcaatttaagctgattacgaatggaagactgttacttgtatttattattactgcattaggatacgggggaacgttcgtaacatttacgtatttatctccgttattacaagaagtaacaggatttaaagcaagtaccgttacaattattttgttagtatacggaattgcaattgcgattgggaatatggtcgggggaaaattatcaaatcataatccgattcgagcgttattttacatgttctttattcaagcgattatattatttgttttaacatttacagcgccatttaaagtcgctggattcatcacaattattttcatgggactattcgcatttatgaatgttccagggctacaagtgtatgttgttatattagctgagaggtttgtacctagcgctgttgatgtagcatcggcgattaacattgcagcatttaacgcaggaattgctcttggtgcttacttgggcggtattgtaacgaactcgttaggattaattcatacggcttgggtaggtggaattatggtagtaggtgctgttgttttaactgcgtggagtatgacattagaaaaaagagatcaagtaaaataaaaggagagaaaataaaatgaaaaacttacaaagtaaaacagtattaaataatggtgtagaaatgccttggttcggtttaggtgtatttaaagtagaggatggaccagaacttgtagaagcagtgaaatcggcgattaaagcaggataccgcagcattgatacagctgcaatttacggaaatgaaaaagctgtaggtgaaggaattcgcgcgggtataaaagaagcaggcatttctcgtgaagatttattcattacttcaaaagtgtggaattcggatcaaggatatgaaacgacacttgctgcatatgaagaaagcttaaaaaaattagagctggattatttagatttataccttgttcattggcctgtagaagggaaatataaagatacgtggagagcgttagaaacactttataacgaaaaacgcgtacgtgcaattggggtaagtaatttccaaattcatcacttacaagatgtaatgaaagatgcagaaattaaaccaatgattaaccaagtagaataccaccctcgtttaacacaaaaagaattacaagctttctgtaaagaacaaggtattcaaatggaagcatggtcaccacttatgcaaggtcaattattagataacgaaaaattacaagaaattgctgagaaacacggtaaaacaacagcgcaagttattttacgttgggatcttcaaaatggagtaatcactattccaaaatcaacgaaagaacaccgcattattgcaaatgccgatatatttaatttcgaattaacgaaagaagatatggaaaaaatcgatgcgttaaatcaaaatcaccgcgttggtccagatcctgataacttcgatttctaagattaaagtaagaaagaagagtgcgtaaaagcactctttttttgtgcataaaaatagtttctaaataaatactacttagtattaagtttgtgataaggggctgtaaacatgaatataaagcaatcgttcaagattttagctatgtttttaagtgttttatttgtgttattcccgcttcaaaaagcatttgcagaagttatggaccatacaaagtatgaaatgaattggagttatagtaagtcaaagaagaaaccaattcgaacagagcttattaaaaccgcagatggcaaaattgctttttgcttaaatgtagatttgaaatctccaagcggtcaagatttaccggaaatggggaaagtggatattaacgtataccgtgtactattgaatggatatccacaaaagagtccacaagaattaggtgtttctgattggagagaagcacattacgcaacgcagcttgcagtgtggaatgcgttaaaacaaatcgatattaatgatttagatttccgcaataaaaatgtagagaaagtaacgaaagacatcgttgcaaaagcaagcgctagtgaagagttacaagaaattacgatgagtgtaactcctacagaagaacaagaagcagtattaaaaaatgatttctttgaaacaggtttatatacagtagaaacaaatgcaaaaagcggaacgtataaagtacaagcaacaggtgcaccagcgggcgtgaaatttgcaaatgaaaaaggcgaaacaaaaacagaatttaatgtaggagaaaagttccgcattttaattccaaaacaaacaccagctggtggatttagctttaaagtatcaggaaatttaacgaaattacaagggattgcgcataaaggtacatcgactattcaaaatgcagtagtattacttgagcgtagtgaagaaaaaacaagtccagagttagcggtaagttggaaaaaggctgaggctccaaataaaccaaataagccatatactccaaatgaaccgcataaaccgaatcaaaagagataatgaaaaagcattggcgtatgccaatgcttttttatatgaattctttaaaggtatatcaagataataattaatcgagtgaaacactattttaacgttttaaaaagtatttaaaaataataaaatgtgacaaaatctaaacgttgcaataaatagattttattcacgaaattgtaacattattctaattagagaggctatcaaacaaagtgtaaagcgtgtaaaattcatttggaaaaactacctatagatggtcatatatgaagaaaatgtaagtttttattgttatttttagatgtatagatgacaatactgaaaaatatcttttactattctcttttttatgtagcaagagaactcatcacaaatagagagaagtgaggagggcatattacatataaattttacaatgtaagaaagcgaatgcatggagagaaatgcggtagtaatatatacaggtgcgcgaggtgttagtccattcatcaaatgtttttataggaataataggattacttattagatgaatatatagggtagtttatctaaataaaggaacaggggacacagattatgtcgaagaaaaagacgagtagggtattagtagctggaatatgtatatctacattattatcgccagtagctttcgaagcatcgaaaggatatgcagcacctttggaagaaaataaaggtgggaaattagaagaggtaaaagagaataagtttgagcagagagtatttcagttgccggggaaaggtagcgtagaagaaaataatcgtttaagagttacttggaaactttccgctaatgaaccgactggaatttatgcagagccaaatgaagagattacaattgacataaaaggaacgcagtctatccaagcttttattggaacgagatcttatgatgaaaaggacccagaggagtttaatttaaaaccagggaaaaatgttatttcatcttcaagaggcggtattttatatttttataatatgaataacgaaggagaagtaacagcttccgttacaaatggtggtagtcactttcctttatttattttaggtaagcatacaaaaaaagattgggatgaaatgttaaaaaaatataaggatccttatgcagttgaattaaaaggtgagagaagcttaattactactacttacgattctgtgcagaaatatatgaagaatacggatccaacagatttaatgaaattgcatgataagattatccgtttagaaaacgcagtggcaggattatctgaggacagtgttgggtttgcaaaatctccaactcattatgttcagtttgttgaaaaacggaagcctgctaaaggggactttatgtttgcaaaacattatcatacaggatatattccaactgcaatgaatagagttttagatatagaggtacttgagaaggatggatggggaccgtggcatgaagttggtcatttacatcagcaagaaccgtggaagtggtctaaagtaagggaagtaacagtaaatatttactcattagctgttcaaaaggcgttagggaatcaattagaaatggatgagcactataaaaactcatttgagtatttagagaagcctaaagcagaaagattcattgatgacattaatcctcttacaatgttttggcaattaaatgtagtgtatggagaacatttttatcctaggttacatcaagcttatcgtttgttacctcagagtgaaatgcctcattctgatgaagagaaaaagcagctatttatttatatgacatcgcaagtggcagggcaaaatttaattcctttctttgaggaatggggattaacaccaaatgatgatattagagagaaaatagaaaaatcaaagttacctaaattagaaaaggaaatctggaaagctacagatagtaatgatattcgtgagaagcaagttgaaccgtataaggttccatatggtgaacctgctaatgaagtacaaaatcttttagttggtacagattctgacgagaatgaagcaagtaaacttgttcgaaatttaggtgagaatgtaaaagtaacaggaaagattgtatggcctaaactagagaatggtaaacaggaagtgttagtagaaattggggatgagaaaggaaataaaaattcaattcctgtccaagttaacggattttatgatgacagtatagtttttcaaggactttcagatgatgtaatgtcgacagtgacacttcaccacaataagaagaaattaaatgtaaactttactaataatgaaatacattaccgttttgaaaaagaagaatatatgggcttaacgctatatgatcgaaatgggattgaaaagaaacgtgtatctgcagaaggacaagaaacgggaaaaagatttgcgatggaactaaatgaattggattttgaatatggtgatgtagtaaaagtattccatgcagaaccggatcgtctgaagttgtaccaaaataatacacttgtagatcaagggaaggctaaaaataaaaaagagaaattattccaaatcactgagcaagggttcgaattaaaagagagtttacaagaagtgacggcgaaaccgcaaaaagtagtagtcggaatggatgtagacaaactagatccgaaagaatttgtacaagtaaaagatggagaagtggttggttttgcagaaaaaccaaatacatcaaaaatcggagaacaaaaagtaaaagtagaaacgaaagatcgatttggaaataagaaagtgacagaagttcctctaacagtaacatatggagatagcctacttgtatatgggctgagctatagagatggtgacttaaaatcaattgtaactttacatcatgatacgaaaaaactgagtgcgacagatacaaagaacctaattcatgattactttaaagatgaaaagtattttgaattcacattgtacgataaagaaggaagagtgaagaaaaatatagcagtaaaaggtttagagaatacgcaagaatttgctaaggaggtaaatggaattgcatttgagtatggagatgtagtgaaagtatatcatgcggaatcttctcgtttacattggtatcaaaaagatgtatatgtgggcgaaggaaaaagtaaagagataaaggaattagtcttcaaaataactgaaaatggatttgaaagattagacggtgagcaaacagtaaaagcaaatccgcagcaagtagtaatcggaacaaatagcgaaacgctagacgcgaagaactttgttgaagtacagggtggagaagtagtaggttttgtagggaaaatagatacgacaaaaattggtcagcaaacagtaaaagtagaaacgaaagatcgatttggaaataagaaagtgacggaagttcctgtagaggtgacatatggggatagtctagtctatcaaggtgtgtccgatgttacacgttcaattattacgttaaaccacgctgaaaagaaattacatgcaacatttacaaatgatgagattcattatcgctttgtaaatgaacagtatataggccttacgatttatgatcaaaatggaactgagaaaaagcatgtaaccgcagaaggacaagaaacttcgcagaattttgcagaacaagtaaatggtatggcgttcgagtatggtgacgtattgaaagtgtatcatgccgagtcagatcgtttaagttggtataaaaagagtgagttagttggaaaaggagataagaaaaagtttaaagaaatttcctttaagattactccaaatggtttagagcaagtgcaataataagaaaaagctcgtaaaacattatgttttacgagctttttttattattcagcttcagaaactactgtgaagcgttcgtttacatgttttgggttttcaatctcatcaagtgctgcaactgcgaagtcttcgtaacttacgtagctatcaccttttgagttaacaagaagattgtctttgccagctttgtaagaaccagtgcgttttcctaatgcgaatagtgcagaagggctgatgaatgtccaagtgatatcatttgtttgttgtaaaatttctaagtttttaccttggttttgagctgttgcaagatattctttcgggaaacctggtgtctcaaatacacgtgttgttttctctttgtctacaaataagcttccagcgcctccaactacaagtaattttgtatttggtgcacctttcatagcttcaataagtacgtttcctgcatctacgtgaaggtgttcttcgcctgctggagcaccgaatgcatttacaactacgtcaaatgcctgcaggtcgttagatgtaagagagaatacatctttctctaaaacttttacgttttcttctgtaatttttgcagcgtttcttacgattgcagttacttcatgtccgcgattcaatgcttcttttaaaatacgacttcctgctttaccagttgctccgataattccgattttcataataaatccctccaaagtgttttgttaaagtgtatatctgaaagtaaatgaatttgttgtaattaggtttgttacaaactgttgtaatcattatagttacgggttggtatttttgtcaatagggttgtttgtgaatttattttttgttttagtatgtacagttagagggagggtagtcagtcataaagatattgttactgtgaacctggctaatatttggaaattgcaaattgtcgaaaaatgttgatttttgaatgttttttaaatataattcgttttatggagaaaaggaggggttaattgtatgaatattttagagcaatttatttcatcaacaaatacaattctttggtcatatattcttattgcaatgttaattggtttaggtctttatttttctattaaattgaaattcgtacaaattactcatttaggggaaatggttcgtttaatgagtgatggactaactggaaagacacgtaaaaagggtagcgtgtcatcgttccaagcattttgtatgagttctgcagctcgtattggtatcgggaacttagctggtgtagcgttagctatttctatgggaggacctggagctgtattttggatgtgggttattgcgattatcggggcttcttcaagtttcgtagaaagtacgcttgcacaaatttataaaataaaagatggcagtggcttccgtggtggtcctgcttattatatggaaaaaggtttaaataaacgttggatggggatttggttctctattctgattacaattagttacggtttaattttcaactcagtacaagcaaacacagttacattagcgtttaaaaatgcatttggtattgagcgttacgttgttgggattgtattagcagtattagttgcggttattatttttggtggtgtaaaaagtattgcacgtatgtcggaaatgattgttccgccaatggcaattctttatattgcggtagcgattttcgttgttattaaaaacttctatttactaccagatgtgtttacagaaatctttaaaggtgcatttggtttagattcagctgtaggcggtggtatcggtgctgcgatgaaatatggtattcagcgcggattatttgcgaacgaagcaggtatgggtagtgcgccgaacgcggcagcaacagctgatgtaacgcatccagccaaacaaggttttattcaaacaatcggggttttagtagatacattcttagtatgtacatcaacagcatttatcgtactatgttctggtgcatataaagcaacgaatttagaaggtattgaactaacacaaaatgcattaagctcacaaattggcccatgggcgagcagtttcttagcgattattattttcttattcgctttcagttcacttctaggaaactactactatggtgaaacaaatattgaatttattaagcaaagcaaaacgtggttaacaatttaccgtattgcggtagttggaatggtattattcggttctgttgcgacgcttcaagttgtatggaatatggcagacttatttatgggtctaatggtaataacgaacttaattgcgattacacttcttggccgatttgcgtacgcggcattaacagactatgtaaggcaaaagaaacaagggaaagatccagtcttcagtgcagattctattcctggtttaacgaatacagagtgctgggataagccagtggtaacagataaagaaaaagcagtgtaattgaaaaggcgagcatcgaggtaaatttgatgctcgccttttttgttgtagtaaatgatgaaaagggtgaggggtaattattaatataacttttttgtttgttcctctcgttatttgtggggaacgtactgttttaaaagtatggctgggcgaagaggataagagattgagtattggataaatgcatgtaatagctatatttttatgaaaaaaacaagtatgttaatatagttaacgtattcatgtcatgaaacctaacataaagttcttgattactaaaagtttttagaatataattttcttattgttaggaagagggggcaatgcaaatatggattttttagctagggtaattggggatgtaaataatatcctttggtcatatgtcattattgcgatgttaattgggttagggctctatttttcatttcgtgtgaaatttgtccaagttcgttacttcggtgaaatgattcgattacttggggatggagcaagctcgaaaacgagaaaagcgcaaaaagagaagagtggcgtatcatcattccaagcattttgtatgagtacagcttctcgtgtaggtactggtaacttagctggtgtagctatcgcaatttcagcgggtggtccaggagcagtattttggatgtggttaatcgcggtaattgggggtgcttctgcatttgtagagagcacattagcgcaaatttataaagtgaaagatgggaatgcattccgtgggggcccagcgtattatatggaaaagggtttaaataaacgctggttaggtgttgtgttctctgttctaataacagtaagtttcggattgatttttaatgctgtacagtctaatactgtagcggcagcttttgatggggcattcaaaacagatagtagattagtcggtcttgttatggctggtttacttgcagttattattttcggtggagtaaaacgaattgcacgcgcggttgaaatgattgttccagtaatggcaattatttatgtagcagtggcattattcgttgtcgtaacaaacattacggcaattccgtatgtatttaaagagattttcttacatgctttcggaattaaagaagtagtaggtgggggactaggagccgcgattttactaggggtaaaacgcggattattctcaaatgaagcaggtatggggagtgcgccgaacgcagcagcgactgcgaacgtaacgcacccagttaaacaaggttttattcaaactttaggggtatttacagatacattattaatttgtagttgtacagcatttattattcttttatcagatgtgcataatgcagctgatttaaatggaattcaattaacgcagcaggcgttaagtcaacatatcggtccatgggcttctatatttgtagcagttgcaatcttcttgtttgcattcagttcattagtaggtaactactactatggtgaaacaaatattgaattcttaaatggaagtaaagtgctattaacagcgtaccgcattgctgtacttggtatggttatgttaggatctgtagcgacaattcaaatcgtttgggatgtagcagatttattcatgggtattatggctgttattaacttagtggcgattgtattcctctctaagtatgcttttgcggcattatcagattacgtaaatcaaaagaaacaagggaaagatccggtattctatgcggattctattccaggtttgaaaaatacagagtgctgggataagtcagcagtagctgataaagaaaaagcagtataatgaggtgagcatcaagtgaaacttgatgctcattttttgttttatccagttgtttatagatggtaaaagacgaacatttatgagcatttcataattaaatgtaattttttaaagaaaagtgcggatatgagttgtgatttatgttagaatggaaaatgcctttgaaacaagagtttttatgacatttcctatccaatcgaaggttacggaggagaaatggaaagttcggattatttcttgttttgaatggtcagacgttcaacgttaatgaagagttaaatggaggattttattaatgaagtttgttatgttccttgtaggattactcgttgtatttgtactcggttttcttataagtgccgatcgaaagaagattaagtataaaccaatcgcaattatgcttattattcagctagcattatcttatttcttattaaatacgcaagttggttatattttagtaaaaggaatttcagatggatttggcgcacttcttggatatgcggaagctggaatcgttttcgtatttggtggtcttgttaataaaggagaggtttcattcttcttaacagcgctattaccaatcgtattctttgcggttttaatcggaattctgcaacactttaaaattttaccgatatttattcgtgctattggtacgttgttaagtaaagtaaatggtctaggaaaactagaatcatataatgcagtagcagctgccattgttggacaagcagaagtatttattacagtaaaagatcaattaagtaaaatcccaaaacatcgtttatatacattatgtgcatcttctatgtcgacagtgtcgatgtcaatcgttggttcttatatgaaaatgatcgaaccgaaatatgtagtaacagcacttgtattaaatttatttagtggtttcattatcattcatattattaacccgtacgatattacagaagaagaagatacactgaaattagaaaataagaaaaaacaatcattctttgaaatgctaagcgagtacattatgcttggtttcacgattgcgattacagtagcagctatgttacttggttttgtagcattaattacagcaattaatagcttgtttgattcaatgttcggtattacattccaagctattttaggatatattttctcaccattagcattcgtaatgggtatcccggtgcgacacgtttctctataagtagttgaactacgaaaagagaacataaatcaggttcaatccttagtagctgcttaatatatttgtctaattttttgggttcagttcattactggcagtccttttttggtagttttagaaattaaattataacatattaatatacgaattataaatatacttttacaaaagatactataagttttttataattcttgatttctcaatttccattgcatactgaattttcctgtaagtattaataactaccattaaaattatcaatccactagattattagaaaaaactggttatctacataattgtttggtaaaatatagatataatttaagagggtaaagttaatatagatcaactaagtaatgctaagaaaatgttttattgcataaaaaaggctccattgctggagcactcaaaataaacaaacgaattaaaacaagaaacagacaatttaactatatagataaaacataaataaatctatatatatgtaaaaatgcatataaaaactctatttattgatgctataataggtttactcgatgattgttatatttttttatggtttttaagcaataaataccttcttaacaccaagtgtacaagaaaagaagacatcttaagtgatgtcttcttttcttatataataacaacacaataaaattaagatggttcaagtgggaggaaggcacctttgggtatcttttctttgtcgaatttgcctaataggtgcagcaccacattgctatcaagttaaaaattttttcacccaaaacaaaaaaacgagctgaattcacataaataactatggaagaaaacaaaaacttaggattaaagaacttgtgatgtatggctatattggctgtttttattcagaaggatatattaatcctgagtatacatttgtatttaatcatgaggatatcgaagaaattatatttgtaggttttatagatgaggagaagaggcatttgtaggattgcttaattgaatatgatctagaaacagatgatcttcaaattccgataaaactagcaatctccacgccaaacttggacaaatcctaagcgggggaaaaacggacgcgaaaatgatgaagagattactattttcaaatcagttggtttggctgtagtagatattatcgttgcgaattatttgtatgagaaagtagtggagcgcgggatgggattgagttttgagggactgccttttggtggtcttttttgcataaaatcttgtaaagtaagaaaaagttgaatattaatattctaatattcaatagaaagataaaatgttttaaagttcaaaataatacattataatatatttagtaaaattaaccaatttatattttgctcattatgtattaaaggggaaatgaaaatggctggacaaattcgtatgtcaccagaggagcttaaatcgaaagcagctcaatatggacaaggtgcaaatcaaattgaggacattttaagtcaactacaaaatttacaaaatgaattaagaggagaatgggaaggtcgtgctttcgaaggttttgatcaacagttcaatcaattaaagccaaaagtacaaaacttcgcacagctattacaagaaattaatatgcagcttaataaaactgcagaagctgttgcttctcatgatgaagaattatcacgtaatttcggtttgaaataaaaattgttttactctatataacaagtatttcaaatgagccatacagcttatattgtatggctcatttgattgcatgcctagcgagtgatattgatagggatatatatttaatgagatttctttggtgcgtctggaaaacttatagaaagggtttgaaagaatgggacaatttcaaagtaatttacaaacagcaacgcaaattgctacgaaaatgggatcagcctctgataggattcaaagtgcaacaagtcgttctataacaaaagcgacgcgtacaacattatctgttaacttcaaagcacaagaagcgaatcagcaagttttagacttgacgaaacaattttccgctgcctttcaacaagcggttgataatattcattcggtatctaatgaatttgagagaatggataacgcacttcacaacacttttcgctaatgtgacaacctacgtaaagtaaaatagtaggaggaaaaagatgagccaagatattgaaaaacaaattaatcaagtaaatcaaaagttacgaaatgtatttgaagaacaggaccgaaatcaattcgcgattcacattcaggagcaagcggaagcagatttttatgaatggagaggtcgaaaccatcgtttgtttgatcgaattttaggaacttggcatggtgatagagaaatgtctcagttttttatgaatacatatcaagaggcacaacatattgaacgaaaagtcacatttgaattagaaaaccaaaaagaaacgttgcttaaagaaagacgaaaccttagtgatttagaaaacgacctttcctatcaacaacaacaattagcgagggaggtcaatgcatgagcttaaatatgtatttaggagaagtacaaggccaaactcaaagtatgaatgctgtatgtaacgctactattcaaggtatggaacaagtcattcagtcaattgatgcctttgcaattgatactgttctacaaggacaaacttatagcagtgcaaaatcattttttgtacaaacctttcgtcctttagcgcaaggaatcatttatctgtgtgaagagttaattcgccagaacgatgcttttccaagtcaatttcaatcacaagtcgcttccacagatgtaattgaacaagaaatattagaacaaattcgagaaattgaccgaatgaaagcaagtatggaagccatcagtcaagctatgccaatcccaggtatggaagctatggtaaatctttttactgtgatgaggcaaaaactgcaagaaaaactagaacatctatatgaatttaattatacttctagtagtaattatgatactgctctccaactagctgttagcattgcgacaggtttggcggaagttcaaagtgggaaagggtttagtcctgcaagtggtacatttagtacgcaagggttgaatatggaatggacaacttcaattcaagggattacagaagagagggcacgacaagctaccaattcaattgaagaaggtgaaatgtgtggtaagctacctgaaaaatctactggtgaaaaaatttgggacggtattgtagatggtacgggacaagcagttagcgatacaatagacggaataaaagctttaggagattgggaaacgtgggaaaacatggggaacgctgctttgcaccctattgataccctcagtacgatgtataatgtattgtcagattcatttattaatgatgtaataaatggagatgctgaaagtcgtgctaaatggggaagttatgctttaacacaagttggattaggatttattggtgataaaggattaagtaaagcaagtaaattaggtcaagcaggtaaagtgaccaaactagcaaaaaataagattccgcaagctgtttcacatattacaagtaatttacaaatgggagatcgctttgcttttgctggtggaaatagtttgcgatttagatttgatacgcctgattttaaaaaagctgaagaaaagctgtcgacctatcagtttgctagaggtgaaagtaattctggtgggagtaattttgttaatgaaaatcatagatcttcactttctaatagggaaattatatctaatttacaacatacagaaaaatttagaccaaatacactcaaacatatcctagagggtgaaataaattggcgtggtgacgcaatgggttatcatactgaagtattggagaatacacctggaaaaataattagcggaacagaagagatattaaatgatcaaggcatttataaagctagggtagaagtgaatggaacccctaaaactggaaatagaggattttctacatttttccctaaagattggagcccgcaaaagattgtagataatataaatgaagcatataataatagaacgtatgaatttggtaacacatattctggaataggttcagagggtataaggattagcatgtatatagatgggaatgggaaaattatctctgctttcccagcggaataaattttatctttagtataaaggagtacaatagtaatgaaatatccatatagctttgaagtacttaccaatggaaaactagttatgaggcttcctcaagaaattaaacttatggagacttttttaggcgttgaagtttctgcgtttggagattggattttagaagaaatacatagtgttttaaatgggaaagaaaattacgtagtagtaaatggaaacatttgtggtttagaaattcggaaagatacaactactgtcctagacaatttggctgaagatggtaagggagatttttgtgagatagaaacgattgaattagtagatttaattcatatttggcaagataaacaaaaagaatttaaaaaaggaaaaaataaagaattgaaataatagatagagctgacttcttatagaggtcagctctatctattatttcatatttctccattatctcaggttttaaagtcttttttcctaaataattatcagcaatagtcattgcaaaagaatctaaaggtatttagatatgatgatgggtggagagatagttcgcatgaattttggtgtaatccatttagtggattaagaattcgtttacaggaagagattgctattgtatctgattttatagaaaatttatatgaagtggatgaatatataaagattttagacgatgctgtagaagggaaatatctcgattttgaattagaatataatgctgcagtagtaaattctaatagtccgtggaaatggaggtagattagtggtggagaaaaattaacagctccccaaaaagctattattaggcaggttgctattgagaaaggtttaatacctgatgttcctatgaaattaggtacacaatatcctgattttaagaaagctggtttaattattaaatcggatgagttaccagaggaaatgtggttggcaagtgacaaacaacaatttaaatggttagatgccaggtaaaatggaattagtaccatttggaatacataatagcatatttcataaaggtgggcggagtgaaggacattggtcttatagatctaaaggtaggtaaagaaatggaggaattaaaatgaagattaaaaatggtagtgaacttcaatcaccaaatgatgaattaattgaatcatttgaggaatattgtgagataaaattaccaaatgattttatagattttttgaaaaaatataatggctctattccaattactaatgttttttcacatgaaaaaaacgaacttttaattgaacgtttcttatgtttgttggaggacccagaagatgatgatgaaaatggttggtatgatatagaggttgtattatctgatatcgatactcgtttaacggatgatgaagatttaacagggataaatgttattccatttgctgttttattcgcaggtgattttctttgtttagattttagagaaaaggaaataccatctgttgtggtatggtatcatgaagaatcagaagaattgaatccggtaactagtgaagttgcagataattttagtgagtttttaagtatgttaaaagaataatgtaagaaaaataattaaattttatttatgggtttgaatttttattaaagtttttttgcttttaatattttaattaaaaaagaagactaatatttgctttttaataggttgatatatattttaaagaaattaaaggagaaatgtatcaaggatattatccttttcttctttattgataccaatgtatttaagtgtaaattgtgggcgatatagattgttataaatcctaggaaacagcaattacaatacactctatttcgtggggtatttggcatcgtatgttcagtaggattattagttataacccaaaagtttgcatatggaatgttaggattacaaactcctatctattttattttttcggttggtttgtatatttttgctttgcattattattataaaaatcatattaaaaaacttcaggaatcaatcaaaaaatcaaaatcatcgaaaaaaaactctagttttggagtagtggcttttgtaggattgggtcaactcattgctaatatcagtcttggttttgcaacacaaaagatggtagcaattgtattaatgtgtgtatactccatgctttcgtttatgttgtttcatttcattatggaactccataggtactattatttaaggaagcatatagaagatgggggtagaacacatgaaaccatttaaagagtctgtattgaattttaagtatataatcgtggttctcctatagtcagtaaagaatgcggaaaagaaaagggagaagcaacatcatgaatatagaattacatttagataaagcaaggatagggaattatgcaattttttaaagaaaagtttttaccaaatggctctattgttctcttaaaaggagggacaaaaaaggttgtaatttacggaagaaaacaactacttatggttgaagaacctgtataactacataggctgtttttattcagaaggattataaaactaatccacttaacgagggtagaacagctcctaagattgttgacaagggtacttttgataaaaatgaatttgaaggtattgcatacgaattacctgaccccactagtcggtggttagtagaatatggacgaaatgctaaacttattaagtaagagaggagaacgagttaaatgattaagcctttatacgccgaaaatattatagtgggtgtaaaatataaaaataagctcaattggtatataactgaatcagatttatggtgtttagattataatcaagctggttatcctcctagtgaatatccagaagaaagaaaaggcattagtattttaaatgagactacaatagctaactttttagaaagaatagaaaaatataaaagatttacagaagatattaggttagaatttttaagagaactaagaactaatagagaagaagcctattatgattataatccatgtttcctaatagattttgagcgtttaactttttattctaattatccggaatcaatatcttttgaagaatatattccgaataactggagaggttatttacagcgatttgatgaacaagtaccctatgaatatagatactgggaagataagaataaaagctatttagttagagaggattaggtcattgaagaaaataaattaattatgataaaagaaacatttaagaatgaagaaattggtggtgtaaaagtagcagctattgcagctggatcggggcagttaattgctaatataattcttagcattgcaacacaacagatgggtgcgattgtatttatgtgtgcatgcacagtgttttcgtttggtttgttttatatgattatagaactccataagtattattatttacggaagcatatagaagatggagggaaaatacgtataggcttttaaagagaatttgttgcatttcaagtatataatcgcattcttcttatggaagccattcacgaggcttatagcaataaaagatgtataagtggaagattatattgtggtaaaacatctgaaggaatggaaattaggtttgttcttattaatgataagattatagctgtttatcccgtgtattaaagaatgtgaggtactcaaaaatgaaagtaactaatcagcccatagttaaaaatgtaagaaaatatagaggtaattgctaagaagcactccccctaagtttcagatgaaattaaatgattgaatatttacatttaaataatcgactatttatgctttaatatttatatgtacataattgggataattagggatttaaatttaatatgttttaagaaaggggaatgttttttatatggaaactccagaaaatcaatttaaacgtgcgcttaatccttggttctccatttggacaaaaccacgtgatacaatgaaagaaatttttatatccaaaccaaagaatgtgtttttactcattttactaggctcattcgtacagactttagatcgagcatcttctaaaaatatggcggattcaataagtagtccagtttcattaatctcaatggttatattcggtaccttcgttgccttcttaatttattattttttgttaccagcgttatttaattgggtggcaaaaaaacttggtggacaaggtacctttgagaaaacacgttactcagttgcctattcttatatcccttacgtttactctcttatattagtttgggtgccttcatttttcttgtttgggatagaaaactttacgagtgagacaccgaaaatggagagtagcataactttaacgattttgtttcttatttttgccataattgatatagttattggaatttggacaatcattatttccttaaaatgtttaggagaagcacaccaattttcagcatggaaagcattattaacaataataatatcctttatgattatcattcttcctttggtaataatagtatttcttatagtaggggttacaatcctttaataatttatttgcttcttatgaacttagagatttaattgaggtttggggacaagcacaaaaaatgtataaaaataataactaaaaaattaacttttataaaaacatttaaactaaaatgcttcttaagcgtgggtccaatagctcacgctttttattttgggtgactataatatttattttttaaatatataatcatgctatttgttacggacaaaccttcaaagaatctattggtgctacagctaattgaaggcgtattaacaatttgagagtagttattgataagaatggaaatgtaatagctgtgttcctaaagaataagaaaagtttaacatgagtttattttttttattcggggaatatgggcgtaattggttatcgagaaaaaattcaggagaataaaattatgaaaaaaataaaccatgaattatttggtgaaattgttcacgatttatattggagcggacaacaaaagataactatttttgggcaggaaaaaatagtttctttaactattgatggagaagaagatgatttaattcctaaagttcaagaagaagcatataggaagttcattactgatataaacaaacttacaaaagaagctgaacaagcaatattcgagtattataaagaagaatatatggaatatagagatatggtaggtgatgaatctgctgataaaatagcgccgattataacaaccattcaagaactaggaaaattggtggaacctgttgggttaattatattaccagattttgaagatggaattagaagagttggattaatattcaattgtacctgggaagaggacggtgtcggggtgaaatttgaaaatgagcaagttgtagaagttggttatcaagacatcgttatttgaacttcaaattatgtgctgtcactatatcgaacagaagctgggtttgtaaaataacaatggaactacgtgttttttcgtcatacaaaaacctctacatataagtagaggtttttaaattatatcttaatgaattatgcttttttagataaagcaaatcgagttcagattaaagaaaaacatagaatacatcattttaactagatttattattaactaaattgtccccaccaccaagctctgcctcaatctgcgaagttttcgatgactcatccatacgccaatacgtaataaagcttatcgcgatacatccagctacgtagaagtagaatagtgattccataccaatactttttagccataatgcgatgaactcagctgttccgccaaatatcgcaactgttagtgcatatggtaaacctacgccaagtgcgcgaatttcagttgggaagagttctgcttttacaattgcgttaatcgaagtgtaaccagtaacgataatgagaccgaccatcatgagtaaaaatgctacgattggttctgtcgttttttccatgaagaagaagattggtgctgttagtaatgttccgagaataccgaatgccattaatagtgggcgacgtccgattttatcggatagtagcccagcaattggttgaagtacgacgaaaataagtagtgcggcaaagttaatccagcttacaacttctttcggcagaccgactgtgtttaccatgaacttttgtaaatatgttgtgtacgtataaaatgcgacagtgcctccgagtgttaggccaactactgttaatactgctttcgggtgtttcataagagcgcgaacggttcctgcgctttcgcgtttttgcgattttatgtttgaaaactgctctgattcatccatcgtgcggcgaagccataatacagctactgcgcccatcgctccaataatgaatggaatacgccagccccaagctttcatatcgggttcgcttagtaattgctgaagaacaatttgaacgcctaacgcaaccatttgtccggcaacgagcgtgacatactggaagcttgaataaaagccgcggcgtccactactagccatttcagataaatatgttgcggaagttccgtactctccgccgagtgataatccttgtagtaaacgggcaagaactaaaataattggtgccataataccgatgctttcgtaactaggtgtacaggcgataatgaaagaaccaccggccataaccgtaatcgaaagcgttaatgctgcccggcgtccgtgccgatctgcatagcgtcccattaataaacttccgatagggcgcattaaaaacccaactgcgaaaatagctgctgtgttgagtaactgactcgttggatctcctttaggaaagaactctgctgagaagtaaacagcgaaagcagagtaaacgtaccaatcgtaccattcaattaaattgccgacagaacctttgaaaatattgccggcgactcgattagattttgcttgagccatactaattcctcctcttgcttagtaataaaaggtatatatgaaagcgtgttcattgtatttgaattgtactgttctttattagaaatctcaatattatgacaattttattctttttgtactttatgtacatggagagttttaatagttgcttcattttcagttttgtcataataatagaaaaaggagattgatagttttgaatattttatcaaaggatatgaagcatgaaaaaatcacgcaaagtgtcattacaaacgaaaatagtaagcttaattatcgcgttaattgtatttgtcgttctcctactaacaggaatatttgtttacattcagtccgttgatacgaagcaccaagtggaacagttagcactgcaaacggctaaatctctttctttcatgccagctataaaagatgcttttcaaaataaagaacataaaagtacgatccaatccattgcggaacaagttcgtgagcaagctgatgcagattatatcattatagaagatcgctttggggtgatgtattcccattcaaattcggaattaattggcacaaagagtaacaacccgtataactatgaggcacttacttttggtggctattatacactcgaaggaaatggtacaagtggtcctgctttaatggcgaaagcacccattattgttcgtaatggagattacgaacaagtagtaggcgttgtgacagtagagtttttaataaaaggtattgaatctaacatactgagcagaacgaaagaaattatactcttttccttagctgtattagtagtcggaattattggcggcattcttttagcacgtagcattcgtaaagacacactcggtttagagccaaatgaaattgcagcgttataccgtgaaagaagtgcgatattactatctataaaagaaggaattatagctattgatcaaaacggttttattacgatgatgaacacctcggcagaagaaatgctacatgtaaattgtgattatatgcagcaacacatttcaaaagttttaccagaatttaatatggaaagagtgctagaaaacgatcaagaaatcgcgtttcaagataaagtgtttattttaaatatgacaccgatacttgaaaataacagtacggtaggaatggtatgtagttttagagataaaacagaactgcaaaaccttgtgaacacaatatctgaggtaagaaagtattctgaggacttacgcgctcaaacacatgaatttacaaataagcttttcgttttatcaggattacttcagttaggacattacaaagaggcgattgaatttatccagcaagaatctaatattcatcaaagccaaaatcatattttattccatcaaattcatgatgcaaaagtacaagcaattttattagggaaaatcggaacagcatctgagaagaaaattgattttcatattgaaggagatagtgcgcttcatccgttaccagaccatataaaggtgtcgcacctcattacgatccttggaaacataatcgataatgcgtttgatgtggtgagtgggcaagaggagaagagagtttccttcttcgttacggatataggacacgatattgtatttgaagtgatagatagtgggataggaataccggtagaaaaaattacgaccatttttcaaaaaggattttcaacgaaaggaaatgatcgtggttacggattagcgaatgtgaaagaaatggtagatctactagagggaacaattgaaattcaaaacgagaaaaatgggggagcgatttttacaatttaccttccgaaaacattgagagaaagtacatgacaaacagggggatgggcatatgttgaaggttgcaattgcagaagatgatttccgcgtcgcgcaaattcaagaggagtttttattaaaaataaaggacgtaaaagtaatcggaaaagcattaaatgcaaaagaaacgatagaactactacaaaaggaagaaatcgatttacttctattagataattacttaccagatggaattggaactgacttattaccacaaattcatgctgactttccaagcgttgacgtcattatggtaacggcggcaaatgaaaaccatatgttagaaaaagcaattcgaaacggcgtaagtaactaccttataaaaccggtcacgttagaaaaattcgttcgtacaattgaagactataaaagaaagaagcaactattacatagtaacaatgaagtaaatcaagcactcatcgataacttcttcgggacttcgcaaacacaagacataaaaaacttaccgactggtgttgatccgttaacattgcaaaaagtgaaaggaattataaaaggattcgacgagggcattacaatagaagaaatgggagaacaaatgggggcctccagaacaaccgcaagaagatatttagaatacttagtagcgacaaacgaatgcacagtagaatacacatacggcattatcggacgaccagaacgaaagtatcgaataggacgaggactatgaaaaaacgattattactatgtatatggatcatgacaggagtaatagcgggatgttcctcggagagatcccatacgaataaaatgagcatcgacaaagtagaaatcgttgcgccgaacgttcaaggagcaggctgggacttaacagcgcgggcgatgcaaaaaacgctcacagaagaaaaaatcttcacaaaaccaatcacagttacaaacaaagtaggtggcagtggtgatgtcggatggaaatatacgaaacaaaaaggcggtcacgtactggcgattaactcaagcttactcataacgaacaacctactaggccacagtaaactaacatataaagacttcacgccactcgcaacattagcatcggactgggaagttgttgtcgtatcaaaagactcaaacatagaaaacgcaaacgaactaatgaaacaactaaaacaaaacaagaaaaacttcaaaatcggagttgcccccggcctaggaaacgacgatcacctatcattcgtacaagtaagcaaagcattcggcataaaccctgccaaactacaattcttcgtctacgaaaacaaagaaaaaatcataaatgccctaacgaacaaacaaatcagcgccgcaaccatgaccctatccgaagccgaaaaacaatacaaagccggaaaaataaaaatactagccgtatccgcaccaaaacgactagaccgactaccagaaatcccaacatggaaagaacaaggaatcaacgtcatcttccagcactggaaaggaattatgggcccaaaagatatgacggaggaagaggttgcttattgggatggtgttattaagaggatggttgagagtgatagttggaaggggattttgagggagcggggttgggagagtttttataaggggagtggggagagtagggggtttttggaggaatgtgattttaggtatgaggaaatgttgaaaaaagaggtttaagagggaaggagtcaatcgggctttatttttgtagttacttctatataatataaaagagatgagagtcttaggctaattacattaaaagggctacatagggatagataaaatctagcttactgattaaaaatatattagtcgttaaaagatataaaaggcatttttcagtctataaagtgtggaaacataaagtatagagtttctgtgagatttaaggaggacataatgaagaaaaatatttatgttgttggagcagtaattgttcaagatgagaaaattttatgtgcacaaagaggaccatctaaatcgctacctcttatgtgggaatttccaggtgggaaaatagaagagggagaaacacctcaagaggcgttaaagcgtgaaattgatgaagaaatgcattgtagcgtgcagattggtgagcaaattgattatacagcctatgagtatgattttggtattgttcatttgaaaactttctattgtaaacttgttgaaggaagtccggttctaactgagcacgtagcaattaaatggttatatccgaatgaactagcagctttagagtgggcacctgcggatatcccgactattgagaaattatcaaaagaatcgattgtaaagtaatttgaaaaaaactattcgttttatgcggatagtttttttattgtaataaatttgcactttaaatcagtgagtaatacaattaatataaaaaattgtcataaatggtgatcatatggagaatttcattcaaaagttagaggggtctttatataaagggtttattgatcaaaaacataatcatcctggaatatataagcctaaattattagtaaacaatacgaagaaaaatgaaaatgttttaagctcattgctggaagagcttgaaaatagtacagcctttattttctcggtggcttttattacggaaagtgggctagcgactttaaagtcacatttccttgatcttaaacaaaaaggagttaaaggacgtatattaacatctacattcttaaattttaatacaccaaaagtgtttagagaattaatgaaacttgaaaatgtagaagtaagattaacaaacttatctggttttcattcaaagggatacatatttgataacaaaacacattgttcattaatagttggtagttcaaatctgactgcacatgctttgaaggtaaactatgaatggaacgtcaagttaacatcgcatgaagatggagagattgttcaacattttaaaaatcaatttgaagaagtttgggagcattctcaagtattaactgaagagttaattggaaattacgaaacaatatatgaacaagttgcagaaaataagttactagatcgagttatagaattacctggtcaatatcataattcaattgaagaagctttgaaaattaccccaaataaaatgcaacaagctgcgttaaaagaaatacaaactattcgagacgctggaaaagaaaaaggattagttatctctgcaacaggaacggggaagacatatctttcagcatttgatgtcagaagttttgcacctaaacggatgctatttattgttcaccgagagcaaatattaaataaagcaaaatcagattctcaaaaggttcttggtggagtagatgaggattttggaattttatcaggatcaaataggcaaataaatgctaaatatttatttgcgacaatccagactatttcaaaggaagaaaatttacatcaatttgatcctgggttatttgattatattttaatagatgaagttcataaagctggtgctagttcttatcatagagtcattgattattttaaaccgaaatttttaatgggaatgaccgctacacctgaacgtacagacaattttaatatttatgagctatttgattacaacattgcttatgaaattcgattgcaagaagcacttgaagaagatatgctttgtccttttcattattttggagttattgattttgaatataatggtgaaaagatagatgacactactgttttatctaagcttgttacggaagaacgagtggatcatatagttgaaaaagtaaaatattacggtttttctggtaagaaagtaacaggactaatgttttgcagccgaaaagatgaggcagaacaattatcacatgccttaaataatagaggttttcgcacatttgcattaaccggcgatcattcccaagaggaaagagaactgcgggtgaatcaattagaaaatggcatactggattatattttaacagtagatatttttaatgaaggtattgatattccgagtgtgaaccaagttgttatgttgagacaaactcaatcaagcattatctttatacagcagttagggcgtggacttcgaaaacacgattcgaaagattttgttacgattattgattttattggaaactataaaaataactatttaattccgattgccctttcaggagatagatcacaaaataaagataatatacgtagatatacaaatgacacgagttatattaaaggtatttcaacagttaactttgaagagatagcgaaaaagcagatctttaaagcgattaacaatagtaatttaacagcaatgaaagtattgaaggaagcttttgctgagttgaaaaatagaataggaagaactccatatctatatgactttatagtaaaccattctattgatccagttgtacttgcagaaggatattcgaactattatcagttcttattgaaaatgaaagaagatgtccctgtattaacagagtacgaaaataaagttttaacgatgttttcattggaagtattgaatggaaaacgtaaaaacgaaatcgttttgttagacttattattaaagcaagaaaaagttgataaggatgagtatataaaacaacttgaagaatctaattgcttaacagatgatgaaacgattacttcagtacaacgaatttttgaattagagtttttctcacaaaacagtcaaaagaaatatggagaaaagccaattctctctttacaggacgataagatgtatatgtttaatgattctatccgaaaaagcttagaacaaaatcaatactttaagcgtatggttatggacattattaaaagtgcaaggaaaaagagcaaaaactatgagtgtgatagtaaccttactgtatataaaaaatactcaagaaaagatgtgtgtaaacttttaaattggcataatgacgagagctcaactatgtatggttataagacaaagtactatacttgtccaatatttatcacataccataaaaatgatgaggtagaatccagtgtggactacggtgatgaattccttaatcaagatgttcttaaatggtatacaagaagtaatagaacattaaaatcaaaggaagttcaaacaattattgatgctaaagaaaataatattgacgtccatatttttgtgaaaaaagatgatgacgagggaagcgacttttactatttaggaaaagcgacacctgataaagcaagtgtagaacaaactgaaatgaaagataaaaatggaaaagaactacctgttgttacgatgaatatgattatggagaaatcaattgataataagatctatgattatataaaggacggtaatgttttgtaggtatattaaatttttaatatctttatgtttctaaaattattaagcgaatatagatggggctgtatcaaaatgacatcggagtatgcttttgatatggtcttttttattggaatttaatatgttttttattagatttgtggattcatttaattggtttaagcagaatgtggagatgagtctttctaatcgaagtaaccgataactagcccctcctaagccccttacaagccccttacaagcccctaccaagtaataaatcactaagaaaaaacataacaaaaacaactacaacaacaaacaccgtagtagtagtcaaaaaaaatttgaaataacacgccaaaaaccctgccatcctcccatatatattatgaaggggcttttacttttgaacggagacgggaggaactttgatggcggtgtatcgtactgtgcaggtgaatttttggcaagatgattttgttttggatttgacgccggaggagcggtatttttatgtttatttgttaacttgttcgaagacgacgcagtgtgggatttttccttttccgaagcggttagctgagatggagacgggttataacagggagactgttgataagcttgtgcagcgttttgttgattatgggaagattctttatgatgcggatacgcgggagttattcgttttgaattggcttcgttataatcctgtgacgaatacgaatgtggagaagtgtgtgcttcgtgagctgaagggtgtgaagaataaggagtttgtacatatgtttcttcagaagtgcatagaggaggagctgaatgttccgatgcttttagcgcatttcggcatgcctggtgatgtggctgtggatgatgttgagccggtttgtgaggagatagaggaagaaacgggaagtcgcgtgttttctttttatgagcaacatttcggtagtttgtctccttttgcggtggaggaactgagtgcgtggatggaagatttgtcagaggagcttgtgctgaaggcgcttcaaattgcgtttgagaataataagcggacgattgcttatgtgaagggcattttgagagggtggcacgggaaagggtttacgaaattgtgtgaggttgaggcagatacggctaagtttcggaagaaggagttgtctgttagtacgggggagacggaggagtttttggcgaggtgtgaggagtgggagaagaatgcgccatctgaggaagagttgcagcgctttttagcggagcgcgggtggcggccatgagtattcaaaatgtggaggcggaaaagacggtgttaggttctctattgcttgctggagagcttattaaggagtgccgtttgacggagcagtatttttcgatgccggtgcataagtctatatttcagttaatgcgaaagatggaaggagaggggcaaccgattgatcttgtgacgttcatttctagggtaaatccgaagtttttagaggggatcgggggaatggagtattttatagggttaatggatggtgtgcctacaactgccaacttctcttattatgaggggcttgttcgaggtgcctggaaaatgtatcaggcgggtgttcttgggcacaagatgggagagcgtcttattgcggagaagagtgagaaagttatcggtgagacgattacggcactttgtgaattagaggagaaagactctgtatgtgagtttgatttgaaggatgcgttagttgatttgtatgaggagcttcatcaagatgtgaaagagattactggtattgagactggttatacatcgttaaataaaatgacgtgcggattgcaggaaggtgattttgtcgtccttggtgcgcgtccttctatggggaagactgcgtttgcgctaaatgttggactacatgcggcgaagtctggatcggcggttggattgttttcattagagatgagtagtaagcaattgttaaaaaggatggcgtcttgcgtaggtgaagtgtcaggaggtaggctgaaaaatccgaagcatcgttttgcaatggaggactgggaaaaggtgagtaaggcgtttgcggagattggtgagttaccgcttgaaatttacgatcatgcaggtgttacggtgcaagatatttggatgcaaactcgtaagttaaagaggaagcacggtgataagaaggttttagttattgtagattacttgcagcttattacgggtgatccgaagcataaaggtaatcgatttcaagagattagtgaaatttctcgtaagcttaaggtattagcacgtgaattaaatgtttgtgtagtagcgttgtcgcaattgtctcgttccgtagaagcacgtcaagataagcgtcctcttttatctgatttaagagagacaggacaaattgagcaagatgcggatgtcattatgcttatgtatcgagaggattattatgataaggaaacggtgcagaaagagatgacggagattcatgtggcgaagcatcggaatgggcctgtggggagttttaagctgaggtttatgaaggagtttgggcggtttgtggaggggatgaattcttgagcactttatatgattgttggtggtatgatatccctgattacggcccggattgttgaacaagaattacaagggtgatacatgccaaagatgtatcaccttttattttttatgacgttttagatattgataatttgtaataaagtttgagcaaatgtcctatattgataggcaggatttttactttttcagcaagcgggttatttgttgaatagttcaatacctattattttgttgcggtgaatatactggagggtatgttaagactttcattaggataggagtgaataagtaattatgaaaaaagcgatacgcgtccttatttctggtgcgagcattaccggtccggcactcgcttactggcttcatcgttatggcttcgacgtgactgtagtagaacgcgcacctgcattgcgctctggtggatatggggttgatattcgtggtgtagctgttacggtgcttggacagatgggtatactcgatcaagtccgtgcagctgatacaaacatgaccggtgtgtacttcgtgaacagcaaaggtgatgttgaaggtcaattaagtgaagcgagtttcgcgaaccagcatggtgtggacatcgaaatcatgcgtgatgatttgagtaatattttgtacgatttaactaaggatacaattaagtacatttggagtgagtcaattactgctatacatgaaactgaagatggtgtagaagtccaatttattcatgaaaagccacagacgtttgatctggtcatcggtgcggacgggctgcattctaatgtgaggtccctgacttttggtgatgaagcacagtttaaacgtacacttggttgttatatttcgattttcaccctcgagaattacctcaatcttgaccaccgcgtaatgctgtatacaatgccaggtaaaactgtgggtatgtatagcgctcgtggtaatacagaggcaaaaggtatgctcctgttccaatcagaggcactggagtacgaccgctatgatgaagaatctcaaagaaaacttgtagaaaatgcctttgtaggccatacagaagactgggaaacttcacacatacttaaaactatgaaagaggcggatgacttttactttgatgagatttgtcaaattcacatgccaacatggtcaaaaggtcgaattacattggtaggtgatgcggcgtatggtccatcacctctatcagggcaaggtactagtctagcgcttgtcggagcttatgtattagcaggcgaacttaaaaacgcgcatggtgatcattcccgtgcctatgttgcttatgagcaagagatgaggggatttgttgagaagaatcaaaaaataggaaaactagctgctgggagcatggttgaaaaatcgagctttaaaatctttctgcgcaatttcatgttacgagtaccaatccttatggtcttccagtttaaggtaatctcgaaaatggtagcgaaagccgctaacgggatcgagctaaaagactattaatatgaatatgtaagaaaagagtattgtctccatgatttatattaccgaacaagattgattgtaataactgtttctggttaaaagaatgaaaaattaataaatataaatgaaaaaattattggataggggaagtttatgggaaatcactcgaataagtcagatgaagaactggaacggttatattatgaagggaatacacgtgcaagtcgagatgcagaaaataaattatacgacagaggatatacactagattctaatagtgatacatgggatttagcatcaaatcaaaatgatactcattcagtagggattccaatacctactggacaaggaacattccttctgtttttagctattttaataggcggtttaatcgcttttttcatcggtggatttctcgttattgcgtatgcggttgaatatgctacatatatttatgtgggctttgttatatcatttgtactcatgtatgtaacgaaaggtaattctagatttatgagttttttattttatttagggtgtttagctctagccactaggttatttacaaatgttattgaactgtttgaaaatgtagattacgtcacttttataatgcgagatacggatggattaggcgttattattaaatatggaattatatatattatatacgcagctgttattcccttattgttaatgaaggtaataacagcaattgtaagaaaaacaaatttaaaatctaataataaaaattctacattaaatatttaaaaaagaggtgtcacatagttataaggtgacacctcttttatttgatctaagagagacgggacaaattgagcaagatgcggatgtcattatgcttatgtatcgcgaggattattacgataaggaaacgaagcagaaagagatgacggagattcatgtggcgaagcatcggaatgggcctgtggggagttttaagctgaggtttatgaaggagtttggacggtttgtggaggggaaatagtgaaaagactggagtatcactttgcaaataaaataaagcataagtgttctatttcattcgcttatgctttattttttgaatatgttcctcatttccccataaagaaagactttctctctgcagtaatccattgctgcaagtcatcttggctacgtcggacaagtcgatttactaaaacatcatgccatacataatcctctaataagtatatatgaacggggtcatctgtataaaaagcaatattacgctcttcaagtgatggtccataaatcatctctttagaatctatcgatacaataaaccaatgttctgtagacaaggtttctgtataaggtgttatgcgatgggcttctagatttttaatgggatcttcaacatgtagggtaataccttgtattgtaactttatcagctacttcagatagatcttcttttaacgcttcatacatctcatcccacattgaaatgacaatacgtcgttctgctttttttattaatgtctgacagtagctaatgattgtttgattgtcttttaaagtaattactcgattatccgttttttcctcggaagtttctagtttttttaatgaatcacttattccttcgtaagtagattgccattctgtttgcgccttctgtaaaaagatttcaacaggtagaggtgaatagcgggtggtgtcatttatttcttctttcatgacaattcctttttctacaaggttacctaaaatctcataaattcgcgctcttgggacacccgaatctttactcacttgataggctgtgacaggcccctgtttaacaagagatacataagatttagcttcatattcattgaaaccaatttttttaagctgttgcactatgtagtccacttttttcgtcctccgatgtttgcttttatattttaacgttacaataactatttacatttagcaaattattagttactattcgaatagtgactaaaggggaggttaatagtatggatttttatttagacccatccgtattaatgattttgattgtttttgggtttgtggctgcatttattgattcagttgtaggcggtggtggattgattgccttaccagctttattgtttacagggctgaatccagcaagtgcagtagctacgaataaactagcatcgacaatgggaagtgcaactagtaatattgtgttttatcgttctggtaatcttgatttgaaatcggcgtttaaattagttccgctcactttcataggttccataataggggcatggactgttcatttaatgaatccagaagtattgaagccattaatgctgatcatgcttggtgcggtcgctatttatacgatattcaaaaaggattggggtagtatttccactcataaaaaattgtctggtcgacacgtcattatttttactttttttgtttttgctattggtttttatgatggatttctaggtcctggaacaggttcatttttaatgttttctcttttatttattgggtatgattttttaaaagcagcaggtaatgcgaagcttcttaatttaggaagtaatgttggtgcattgttgatgtttatgtatgtagggcaagtcaactatgcgtatggttttataatgggaattgctcaaattgctggagggattgttggctccaaattcgctataaaaaaagggagcgggtatgttcgtgcccttttcattacagtaacttgtttattgttagcgaaaaatctgtatgactatattcaataagtaattaaagaacgtagaaaaggtcaagtatgcaaactacatcgagtataagaagatactaaggagagattccttttaacattttttagatgctaccttgtttgaagatagcatctaaaaagaaaatctaagtgaagagaatgaaaataatataaactcatatttttctggggtatgtttattgattctattgaaatgtttactctatattcttcttataattaggcctcaacaaactcttaaaatccaactcagcaattaacacactcaataatataagcgtagcccctaagtatccttttcctgtcagcgtttcacctgtgaaaacgaaagcaaagcctgcggaaaagacaggttctaatgaaaaaataagacctgtatgggtaggtgtagtgtattgctgggcgataacttgcacgatgaatgcgactgcggtgcaaaatatacttaaggctaggatgattagccatgagttggttgtgctaggcagttttggcgtttcgataatgaatgaaaaaataagactaaataggccgacgaagccgagttgtatgactccaagtgcaatggagtttacatgttttgttacacttccagtaatgatgacgtggatcgcataaaacagtgcagacagtatgcaaaatatatcgccgttaccgattttgaattcgctcgttaatgttaataagccgattcctattatcgttaaaatgatccctactatcactttcttttccggaatgtgttttaaaaatatagctgataatattggaatgaaaatgactgtgagacatagtaggaaaccagcattagaaacactcgtatactttgtaccgaaagtcgcgaaaatgtaaacgataaataagacagaagcgagtataaatgcatattttacagttttaaaatcgatcttaaataaatgtttgtaaaatattaaacctgataaaagaaaagcgataataaatcgtaatgcgattaaattatattcttctatgccatcaagtccaagttttgtaagtaggatggatgcaccccaaaaaaatgtaactagtagtaacattaaatccgcttttaattgtagtttcatttctattccctcgttatgtataaattttataagcccatacccctatccccattattcattttaatattaattctgaatatttgtaacttaaatttatcgacgttttattccataaaaaaagaggctgtttataaaacagcctctatgtatctgaaaatccgaaccttgactaaagactacgtacaatctccaacccttttcttgttaaatgaatccctgctctacctttttttatttccacataacctttcatcttcaggaagttcaatcggtgtctaacctgtgcctcagttaatttcatttcgacttcttggctcttttcagaaataattcttcttccgattgcttttcctttttcttcataattcatgataagggtaaggatgaaaagtgattcttgatcaagagcgtttgaatttgaagaaaagggtttaatattttctgcctgatcgctatttgttttcttatgtggaggcttttgaaaataatgttgattaggcaaatcattttttgttatttggtttccggtacggacagcaagcatgtaatctatcgtatttttaagttctcttacatttccgtaccatggatatccttgcagttcttcaattagttcttgttcaattttgactttagggtccgatagtgtgacaaaatgtttagctaataattcaatgtcatttcggcgtgtccttaattcggggaggtgtataaagagtactttaagcctatggtataaatcttctctaaacatattttcttgaatcattttcagtagatccttattggttgctgcaataatccggacgtctattgggataatttggcttccgccaacgcgcataatctctttttcctgcaatactcgaaggagtcgtgcttgaagtttcaggctaatatctccaatctcatctaaaaaaatagtgccaccatttgcttgttcaaatagtcccattttcccgcccttttttgctccggtaaacgctccgtcttcataaccaaataattcactctcgactaaatcatccgataaagcactgaagttaacagcaagaaaagggccgctatttcgctgggaagcattatgaatagcacttgcaaataactcttttccggtaccactctcaccctcaattaatacagttaaatcagtcttagctaaccttttggcaatttgtttcgtgtcttggatcgtagagctaatcccaacgatgttatgaaaattgtattttgctacataaccttttttgacaaattcttttcttaatttacgttcaaacccgatggtcttaagggcatttctaaaagtaacaataatcgattgatcatttatatgtaggcgttctactattacatccgagccgtttacaacaaatattccgctttcttgttgcttattcaaaaggatgaagtttactaaatcgatattatcaataatggcatcaatcggatgaccaatagcatttttactttttattttcagcatgctttccagaaattcattaaagacaacaattcttccttcataatcaatagctagtatgccatcaccaacaccatcaataacttgatgaagttgtcgatgagctttagctaaattctttgttaaatctactatttttcgatagtatctctcagaaacgtggttacctgattcctccattaaatgaaatcgatctagaatggacatgattgtagtaatatctattaatctgtgaccaatattaattactttttctacaaaatcagggataatttcaagttcgccaggtgtgattgcgagcttgatcatttgtatattcgtttttccaggatagtatggaaaatattcaatgtggtttagccccaattgacgcatcgtttcaattgattcgtatactgtttcatgattatcattcacatatagggcttgtgttccttctggtaaaaataaaagctggtccacgttttcataatttaatgttcgttttgctattattacttcgcagttttccccaataaagtctttcaccgtttctatcgtaaatgtattaggtaacacaattaatgtagaatgaaatacttttggaatactttcttctacagaaaaactttcgatatctatgagatcatctaccatctccgttagttgttgatgtagggcttttcgtgtttcttttaaaacggtgatcaatacaatgtggttggtttcaaatttgttcatagagcacctctttagttgaatggaattggtctaaagttggttattaattggtcattatgtaaccaattaataaccaattataatacatttcagcatagtaaacaccgataaaacgacaaaatatttaaaaatatgtaaataatcactttaatttcgatgttggcacgatatttgcttatatcaatggtgtgtaaagaaataatgaaatgagtagagtcataatttacatatttaattctttaccacttgctagaaaagggaggttaagagtatacaatttcagcagagaaagacaacgaaaccatttaaattatgaggtgagagaaaatgaaaccactaattggtgttacggggtattatgttgatcatagtgaaatagggaaggagggcttacgagggctgccaggtcaagatatggctatcttttcttacgactacatccgttcacttcaacgagcaggtgcaacggttgttctacttccaattgaggaagttgatcaaattgagtccacacttaatcaattagatggattgttattggctggtggcgcggacatcaatccagtttattacggtgatattccaaaatcatatataggtactgtagaggaagaacgagataattttgaattaaatttggcaaagcaggctttagaaaaagatattcctattctaggaatttgccgaggattacaggtattaaatgttgcagctggtggatctctttatcaagacttagagcacgagatggggccagaatatttccatgtccgagaacagttccgtaaatggcaaggctctcattcagtagatcttctggaagagggaaaaatttatgaggctattggccaaaaatctttaatggttaattcttttcaccatcaagcagtgaaaacattagggaaagattttgaggcgagtgcatggtcctttgatggtgtaatagaggctattgaatcgaaggctcatcgttatgtagcagcggttcaatggcatccagaaatgatgtcggaaagggatgtcttgcagcaacgtttatttaaccaatttgtaaatgaaattagtaaaaaggtagttaaatcatagcgtgttataaataagagaattggtggatagcttggtacgtcatggtagtggggaaaccagactgctggctgtctgtaaaagtaataatcagtgggggatgaacgaaccccccactgattaaagtttcattctatctcgctttaacgggcagtaagacccccctcaaaattcagcgaaagcaaagagaagttagatgggggatcaactgcccgtaaaagccccattggttcaactaataatcattgggggaagaacatcccctactgattaaagtttcattctattgcaaaggggattggtatatgagtcaagtatcacaaaaggcagtttcattcgagccggaagaaaaaaaggaaaaaaaagaatggaaaataaacgtatttgcaatgttacttgtcttgttaggtattgcggctgtgattacacatatattgccggccggaaaatatgaacagattgaaaaaaatgggtatacaacagtagatccaaattcatttaaatggattgaatcaacgccacttggattttttgatacggtaaaatctattcctacagggatggtagaagctgctaatattatcttttttattcttattatcggaggtttttttggtgtattaaaggcatccggtacagttgaggctcttgtttcaacgatggcaaaaaaactcgctaaccgtgaaaagttaatgattcctattatcatgctgttctttgcacttggcgggtcattaatggggatggctgaggaagctttagtgtatgtacctctatttattccgctagctcttgcggttggatttgatacgataacaggaactgcgatggtactagtaggagcgtccgtcggatttacaacggcaattatgaatccgtttacagttgggctggctcaagggatagcgggtcttcctatgtattcggggatggggttccgcctcgttttattcgtagtcatatatgtaattgctgttacattcgtttatcgtcatgcgatgaaagtaaagagagatcctgcaagcggaatttacggaaaattcgatacaaacaagcaagacagcctactaacagcgaaagtagagttaacaaaaagacataaatggatattaacggcctttttaatcaattatattattcttgtatttggtgttattaagtacgagtggtatataaaagaaattgcagccttatttattattttaactataatcattgcaattcttggcaagatatctcttgatgatacagtagaatcttttacacaaggatcggcatctttaatcgggggagctttaattattggtgtatcacgcgctattttagttgtcttgaatcaagggcatattatagacccactactgtatcaagtgtcggaaggaatggaacatatttctccttttttaagtgttgttggaatgtacaacttccaagtagcgattcattttattttagcatcaggtagtggtcatgcaatgttgacaatgcctatcatggcgccacttgcagatttattggacattacacgccaaacagctgtattatccttttcattcgcggatggtattggaaacattatttttccgacaggtggtacgctaatggctggattagcaattgcaggaatttcatggacaaggtgggcaaggtggattcttcctttaattctaattgaatactcgatcggtttaatagcagttataattgctcatcttattggttatggtccgtcttaataaagactatacataaatataaaactgaagagactcggaagcagaattacttcagcacgattaggaagagcgatggtgcgagttgggaaagatggatattcgcattcaattattgagagttcggatttgaagaagattgggaagtgatttacgaaagggaatagaaagaatgaaaaagaacctaatttctctattttatatggagaagttaggttttttcgttttgaaatcattatgagaaatttcttatatatttctcatatattcatcatgcttccttcattttcttctcacgtctacgttttacaatcgtatgtatcaaaggtaaagggaggtcatacattttttacttatttcaaaacgaaggatagatggtggtgaacagatgaaaaagaataaacgtaaaaaattgcgttggttaaaatggattttgatccttccgttacttctgggattactattgtttggattacatagtatgaagtttgaaaggtggggtcatgagaaacataagcaagcagcatatacagtttctcacgataaagaaagagaagctttcgttacgcaaaaagaaaaatttaataactttgagcgagatcagcatcatgaaaaacaccacgaaaaagagtttgaaggtttattctttataccattcttgttagcgtttggatttgttcttttcggctggtacatgcttcgtaagtctgaaggaaatatggttaaaaagtggacaggcatattgctcctagttattggtgtattaccagttcttccggtgctcgcatttgttgcgataattgtttggacatataaaaaattaaaggaaaaaagattggcaactcatatagatgtatacagcgattttcaagtgcaccaacaagtggatattttagatcaatgggaaagaagtattcgtaaggaggagaagtaataatgggtattttaaaacgtattaaaaatattgtagtggcggatgtgcatcaaacgctagataaaatagaaaatccgattagtatgttaaagcaatatcttcgcgagacagaacagcaaattacgaaggcggaaaaagcactttcgcatcaatattatttagaaaagaaatatgaagcattaatttcagaaacgaatgctcttattgcgaagagaacgcgccaagcggaacttgccgtatcacgtgaagaagatcatatggcgcagttagctttgcaagaaaaaattgtgaatgagaaaaaagcggagttataccgccagcagtacgaaataacaaaagagcaaacagcgacgctttatgaacaaattgacaaactgcaaaagaaatatggagaattgcaatataaagaacttgttcttgtttcaaggttaaatgcggcgcaagcgataaaagaaagcaacagagcgattgattcgttccatacagaaagtacagcgaaaggttttgcacgtattgaatcgtacgtacagaaattagaagcagaaacagctgctagcaactacttttacaatatgaagtctccgaatcaacaagaagtgttagataaaaatttacaagaagaagtgcagcgggagttagagaagttgaaagagaataaatagtatgcaaaaagcccatttcatatgggctttttttatcgataaaattatctattcttttccaaactgaaaaatatcccgattaataagttggtggagatacctatccatttcagcagcagaaacttttctttcatttttaaaccaccatgcgcttaatgaggtgattgcccctgaataaaattcaatgattagatcatttggcatcgtatgatttttgcgcagttgatgtaacgcttctatttcttgttttctcgtttcgtgacttaaatactgtgtccggttaataaattgttcatcagacatttgtgtttctaatattttaccgatttcttcatggtgtagaaattgttccattacttgaaatggtttacttaatcgatctgaaaccggtattcccgcaatcatcttgctgtatcgtttaaatccaaatgctaataaagcatctttatcttcgaagtgtttataaaaggttgttcggtgtaccatcgcacggtcacatatttggttaatcgtgatcgtactatatttctgttttgattgtgtcattaattcaaataaggaatcccatagtaatttatgtgtacgtctaatacgtaaatcaatttgtttttcattatcgttcatctacaattctccttttttgtagattaaatatacagtggctgaaaattgattctccctttttaatctacatatgtatattatattacatgtgttctggtgtatttaaagttttttagtaagaaacaggaggagaatttgcaaatgaatatgacaactaagagcccagcaagtggcaaagttgatacttctaatatgaaacatacccctattttaattgcattacttttaggggcaatggttgcattattaaatgaaacattacttggtaatgcgttaacagtattaatgaaagaatttggcgtaacagcttcaacgattcaatggctttctacagcgtacatgttagtagttggggttttagttccaattacagcgttacttcagcaatggctcacaacgagacaaatgtttttgatcgctatggtaacgtttttagctggtacattaattgcgggatccgcaccgacattttctgttttattagtcggccgtatcgtccaagctgtagcgacgggattaattacaccgttattaatgaatacgattttaatcatttgtccacctgaaaaacgtggtgccacaatgggattaatcgcacttgtgatgatggcagctccggcaattggtcctacattatctggagtaatcgtagactcactaaattggcgctggttattctatattgttattcctgtcgtgatcatttccattatgattggaatgaagtacattcaaaatgtttcagagttaacaaggccaaaagtagattatccatctatccttttatcgacactcggatttggcggacttgtgtatagctttagtgcatcgggtgatttaggatggtccgatgcgaaagtgtatggcactttacttgttgggcttatctcattatgtatttttgtcgtccgacaattaaaaattgagaatccaattttagaattacgcgcatttaaagtctcgatgtttacattatcaattggattaatcgtcattgtgatgatgtcgttattttcaacgatgactttattaccgatgttcctgcaaacagttttactcgttacagcttttaaatcaggaatcatcatgcttccgggaagtgttattagcgccataatgggaccaatcgcaggtaaactatttgataaatttagtccgaaagttattatcgttcccggtattgtgttagtggggatagcaatgttcttatttaaaggcattactcctgatacatcaatggtacaaattattgttatgcatagcgtattaatggttggactcatgtttgttatgacagcacaaacatacggtttaaatcaattaacaccagatttatatccgcacggaacagcactgtttagtacactgcaacaagtagctggcgcaattggtacagctatattcatatcgaaaatgtcttcaggaacaactagctatatggaaagctccgcaaatccactggatccagtagagaagttaaacggtttaacgtctggattccaaggtgcatttgcactagggttagtctttatcattgttgcttttatcgtatcgttgtttttaaaagaggagaaagagggagtaaaggcagcgagggttttacagaacgaacattaaggtttatataaaaaagacatctttccctaaaaaagatgtcttttttatatttttttcgtaacacttgtttttgatgtcttaatacataagaattggtatgtaaaatatttgtattttttgaacatgaataattattgagaataacgatgcaaagctgtgctaataactaaaagtccaataatgagagaaagagttcttataataagttctgccactaatagttcaccaaatgatttagtgacatcgtatatagatcctgttatgagaataggtgcaatcataattataattccaattattatttgaagaagtagattgatgtttttattcaagacaatcacctccaaaaaaatagggaatgagaatatgggtttttttgtattataaaatgattatatcgtattacattaaacgatgagaatatttttaaatagtagaaattagagactcttcaataaaaaggaattaaatatggtattctttagttaagatatgtaaacgaagacgggggaatgaagatggataagaagctaaagtattggctagcatctattatagggggagtagtacttgcaactggtatgacttatggaatattacagtttgctgaagtcccgcttaagggtgaggaccatgtttttgcagaggttaataaagaagacatactatcgaatgaagcagaagtgaaaggttcaaatgcacaacttcacattacagtaacttctactgaagaagaagttatttcagctatgcatagcatgactcatcaaaaagtaaaagcgtgtgaaggaaagggagcaacccctatgtccaaaaagaatgcagagaaagtaagaaatattctaaacggaaacaatttcaagaacaaagaagagctattagcaattactgaaagatgggcaaatagagattttagtaaaattgtagaagaacataactattttattaaacttcaaggtggcaagataggtgaagctacagtgatggataaggtagacgagcaagtattctgtctcaatactttcggtgatgatgtaacggccgcattaattaaatcaggagatcttcaagcgctgtaaggtgttttttctctgatataaagaaagcctcaagtattcatatacttgaggcttttccaatggaaagataggaatggtccgaattctttacattaagaacaaagtggaattactcctaaaccaattaataaagctgcagcaactgctggaattggtacaggaatttgaataccttctacaaataagaaatattgaccacttactattttaaaacaaactaattgcatggctattcctcccttcttttaggattaatacattatattaatttatctatctattgatatagttaaattatttatttttaaaaatatagttaatatgtgaatagtcttcgaaaggacctgctcaatcaatgcggaaaaacataagatgaaacgaatccattaaaatacatgagtgaaccttagttttcccctcttatctaaaggaggaactattatgggttatggtggtagttgtgttattcattttattaatcatcgttggagcttcttgcttctgctaaaaactattggaaaagacactcatatagagtgtcttttctttcgtgcaaaatgattcctgacaatagccaactgtataaagtatacggtatacttttgcctcattagacatataaaaatgttggagggatgttatgaaactagtagggaagcacatttatattcggctttataaaactgctgatgctaacgagttagctaacttacatattagaaatcgcgaattttttcaacgagtttgcccgttgctcccagaagttttttatacagaagaacatcaaaaaatacgtcttgaacaagctctaaaaaagacagctgaaggacaagtatacccttttggaatctttttaagagaaaatgataaacttatcggagacatttcattaactcaaattgttaggggagacctccaaagctgttatacgggattcactttagataaggagcataatgcaaagggctatgcaacagaggctcttcaacttgttgtagattttgcttttagggaattaaagctacatagaattgaagcaggagcgatgcttgataatatagcatctattcgtgtattagaaaaagtggggtttaaaaaagaaggtatagcgaaagaaaatataaggattaatggcaaatggacagatcatcaaatattagctattatcaatagtttggatgtgtaagcttattttgattccaataacgataattatgtaaatacgaaaccccttcagcaagtaaactgaaggggttttttctagatacattgaatcccgataagtgatgttatggtaactaagtctttgtaagtattgtcactatggtataatatggttaattatgtttgtaaaaaggagaaatgtttaatgggagtttttacagcattgttagcaactagctcaattttattagtagcttgggttgtaggtgaaagagaaaaacaaaatcaataataatattttatatttatggatgaattaattataaaattaagaggggtttgggtatgggagacgcatatgggggactaaaatattttggttttttacttgtattagtatttagtgcgggatttattatacgttggatttttcgtgatgtaatttcgttagatcaattacttggtttaggtataggaattattacgttaataatggcgttttttataaagaaatacagtaaagagctaaatactaatagttaatttatgttttctttggatgagtatctcgatagtgaggagatactcatcttttcttatgagggattcaacttctttgtttataatacttcgaatgtatacttttattttatattttgagagtatcagaagatttggtgtgaactcaatgtttaaggtaatttaaaagtttactttcaggaataacaaaaaaagagtcctatattaaaatgtaccctatagaatagacacttgaaaaaagtctattctatagggtatttgaaaatgtacatatttattcaagcgttaatgtacatatttaagttagcatttatagggggggaaagtattgttatctaacttatttatttggatttctttaatactatttataattattatgaaaagtaagatgcgactattatttaggattcctatagctatctttatagctttgctaattttgtccattggtgctatttatgaattatatcccaatttggagaaaattcaggatggattagaggggaatcaagaaattattattagatgatgttccaatatgagaagaattaatatgtgaataactgcatgaatattataaggtgtgaaatacgtgaaagatcatttcgttacacgaagtgatctttctttttttttgcgtaaatccaataaatatatagaaaaatcgggggatacggaaggacggaacgaagtggagcgaacgacatttttttcgctctttgagcaaaaaaaattagtaatgcaggataagggggacgccacatacgtggctacaactaccaggcaaagcctggtatatcatggttttttcgtgaacacatttgtgttcattctactttaataaaatgcttttatgtgggaacaaaatgtgatactattttactagtactaaataactacgtagcaacaatgtatggtggtgataattattcataaaaataaaaatagtaggtataatgacctactcagagtccgagttccaacagatttaaaagcgaaattaaatgcggtagcagaggagaggggagaagatacagcagatgtagtaaggcgtttttgtgaagagggattacacaggcattatgcagaaaataatatggattttattaaagttgaaatacgagaagctttaagagatgtactgaaaccttcggtagaacgtcttgcgaaaattggtgctaaaggatcagtttcagcaggtacagcgatgtatatgttagttgaatcattaggtagacagaatttagatgttaaagacatatattctcgtgcacggattaaatctgtagaaagtttaaggtcaaaaggagatattgatgaataataaattactaatgttttaaaatttttgatttgatttattgaaaggtataaaaagaagtatgaaagctccatttatcatgaaaacaagtttttatttacctagcacttctaatgctaaaaaaaatagtgcccatgttgaatacataggaacaagaccaggcgtaagtatggaaacaacaaaagactttgaagagttagaagaaaaaacagatgccgcacatcatgcaaagtatgctggggaacgccctggatcacatggcctttttacccaaaatagtaatgaagctctcgttttgaaagacgtacaaaaagaactaagagagcatgacggggttgtttggcgaatgatacttagcttaaaagaagaagatgctttgaatctaggatttacggagaaaaggaaatgggaagatcttcttcgttcgacagttccagatgcagcaaaaaaaatgggtattacagaaagtaatttgaaatggattgccgcctttcatgaggaaaagggccatccgcatgttcaccttatgatgtgggaaaaagagactaagcgtgaaagaggggctttgtctaaaggggaacatagagatgtaaaaaatgtatttatgaatgaaatatatcgtgaagaaaggcaggaattaaatttaataaaaactgtagaacgtgatttcattcgagagttcgctttagacaacgttgtagatgcagtcaaaatgttaaaaggtttagatgaagtagataaaacacaagttggcattgcaccacgcatacacacgcatgatattgaaaaattgcagaagtctctttatgaactttccaaaatgttaccagaaaagggccgtatgagttatgcatttatgccagatgaggtcaaaaaagaggttgatgaaatatcaaattggttaataaatcgacctcagtttatggaatctacagaacgttatttatcttccgtagaaggtctaacaaaattacattctcatgatcctgaaagaatagaattagcgaaagaaaaagcaatgaaagacattcaaaaaagagtttcgcaggttcttttaaagggtgcattagagacaaggattaattttctaccaaaagttgaccaagaaaaagcgatgaaggcacaaatgcaatttataaaagctaatggtaaaccgaaacaagatcttagttatgatgtgactaaaaaaagtgcagcattattaaaacatttatccttttcggaaaatgaaatcaaaagggtttttgaaacctggtcggagaaagcggatttggggcttagtgaaaaagaaattagcaaaagtattgctaattcatcaaaagaagatattaaaactattgatgaaaaagacattaaaactggagctgaaatactaaaattagcaggttggacaaataatgaaattatatccaagttaaatagatacgatgacgttttagatgggattgaaaaagttttaaataagatcgaaaaaaaagcgaactctaactttgtatcgaaaaaagattttagcaagattgaggaaataacagatgtatctgtggattatccatataaattagtagaacgcagtgaagtttcaaaagaagatgtggataaaatgattgaaacattttcgcaaggtatatgcagggatgaagcggcagctggatggacagcgttttgcatgagtgttgccctaaagcaaagtgaagtttctgagagtaaaagaattgatgttgtttcagagtggattcgttctaatgaaatagcaggagtagatttgtatgcgattaatgaaaaaatcgaagaaggatctaattttttacgtaagaatacatgggataaagtattaggaaatataggtgttaaaccagaagattttaaatacccattcaagacttttcaagaattagagtttgacgaacaaaaagctgatgaaactttattgcagttagaaaatattgtagtcgaaaaaatggaagtgccagatagagaacatttaaccgaggtctatgcaaggattttaagaggcgtggcatctgacaattcgttatttaaagaaaaaataaatgtttgggctaaaaaaagaaagttacctcaaagtttagttactaaggtaataaaaaaatatgaaaaaagaacgaacgacattgaatacttaaaaagacctttaagagtacaggatatgaccgaaaaaactattcgggattacagtaaggttctatttgctacaggcatgtcagaagaaaaggttaaagataccgtacttgaatggaatagacgggtgaaaagtaatgctccacccgaaaaaatcgaaaaaataattgaacaagtaggagctcttaacgaggaaaatcaaagatggggaaaagcaacctatgtaaataaagagagttataaacaattaaatgagactttaaatgttaaagctccatatatttataaaatgccatcattcaagaatccgaacgcttcaattaataagatatggaagtcattctggaatgagttagaaaaagagcgtatgaaatcagaaaaagaaatggaatatgcaagaaaaagaatgatgagagcaaaagaacaagaacaaaaacaaagacaagaaagggaagagagaggttgaaattccgaatatttttagttgtttttgtgattttagctgatttactaatcttaccaaagattgtatataatttagaccttttatttaagggaattgatcttcaaattgttattaataatttaactacattttccgttatatacccatgggtaattttgaagcaatcttatggaacattttatttaatattacagggttttgttgccacagctattgttttgattatctggaaagaaaatagaggcataaaaaataaaatgaagaatggtattggcggtccagaggcatccggtggtgggcaatttgggacaagtaggtggcaaactgaaaaagagagagatgctaataatagtgtttggaaatatgaaaaagaacctataaaaacagctggtatagtcctgggggctgatttaaaaaagaaaaaagtatggcttgtatcggaagatgaacatacattaattatcggtacaactggttcaggtaaaacacgaagaattatttatcctgcaatatggacgttagcaaaagctggcgaaagtatgattttaacagatccaaagggtgaattatatgcagcaaccaagaaattcttggaagaacagggttacgaagtaataatgttggatttccgtaaacctaaggctagtacacatcattggaatccaataaaagctgttgtagatgctttaaaggaagatgatgaatcgaaagcttctgaagcagcatggaatatagcaaacatgattgtatatcaaaaagagcgtacgggcgaccctgtttgggctactggagccgaaagtgttattgccgcattgattttatatatagccatagaatcaaagaaagatagtcaaaagcatatggctagtgtgtttcaattgctagttgagtatggggtagttaagaaacgtgaaattggcgatgggatgatggaggaatatgttcccttattggaattgattgaatcgttagaacgaggccaccttgcaaaattagcatttgctacagctggtatggctcctgaaaaaatgcgtggtagcttctttgcatctgttgcagcagatttaagattatttgcagatccttcaattgcatatatgactagttttcaagatcacgatttaaaacaacctggtgaaaagaaaacagcaacattccttattatccctgacgaagttaagactcgacatttcttagcaacgttatatatagatcaaacgtatttcgagttggttaatttggcaaattctagaccagagggacgaattgcaataagaactagctgtttacttgatgagtttggtaatatgccgagaatttcagattttgacactaaaattactgtttcaaggagtaggggagttagatataacattgttgttcagggattggatcaaattaaagaaaagtatgggaaattggctaatacaataaccggaaactgtagagtctggttatacttgttgactggtgataatgaaacagcagaagttattagtaaaaaattaggaacatacacagttgcaactgatggctattcagctactactagaacgaaagacttttctgctagttattcacagaatctatcaaaacgtgaactgttaacacctgatgaagtaatgagatttccagattttgaagcgattgttattaggcaacgtcaatatgctacaagagtccctactcctgatatttcgaagtatcctattaaatttatacccattgaaaggggtgatttggaaaagaaagatattagatttgatgtatttgatccatttaaagcgcaatgggaaggagaacttgaagcaatcgaaaaagctaataagacaaatgatttagaagaaactgctgagacagaagaatttgaagaaacaatggatattacaaatgaaccaatagatgtagctgaacaaaaagaaagctatatggacattatttaggaggattagggaatgaaagaaaataaagatttaaaaatgaataaaggtaaaaagaaaaaaattagttttaaacattatttagcttttgcattaccatatgtattgtttgcagcactgtttgtaattgatacttcagcatatgcggctggggagccaaagatttattctggtactaaaaaaatgattggtgatgctacaacatggcttatcgcactagttcctattgcgggtggttgtatggttgcttggcaacagtttaaaaagcaaatgtctgataatgatccagctgatattgcacatgcaaataaacgtactaaacagattttagttgcaacagcaattggtgtatcggctgtagggttaattaaatggtgggctagttactataactaagaagaaggttaaaaaacatgggattcatattagataagatatttaacagttggattaatggagcaattgaatttttcttgaaaataattgccgaaattgccggcgtatctgtttatgtattagaactagatattgtaaaacaggccataatctatacgcaagttattgctctatcctgggttgtagttgttgttgcattccaagctatatacacttatatacttagaatgaatggggatagtggagcagatcctatggcacttataaaaggttccggtcaagcggtagcagttatttgtacgattccttggattgtatcttatgtatataaatttggtacacagatggctgttgatgtagctaaattacctggagccaaatgggacaagagtactagtgaaataaagcaaacactggatttaattgcaaaatcaacatctgttatacctctatttgtattattatcggttatcgtggctgttgtagccattattattgttcttatacaaacatctattagagcagctgaactagcttatgcagctgtagcgggtccacttttggctactggattggttacaaattcagggatgtattcagcttggtggaaagatgttttagcgatatcattagcccaggcttcacagctatttatgttaaaacttagttttgaggctttaaaaacaatggtatacaaagattttccgattatgtcgttattcctattcttggggattctttgggtggcaatcaaagtaccgaaaacccttcaaaattgggttcatagtacaggaacagggagaatggcaacaggtgtagctcagcaggcagctacagcagttataatgagaaaagcaatgacgaagggagcttaatatctatggaagatagagagtttgagaatccatatttaatccctaaaaacattaaagcacgatttgaattaatacctggttttgggtggcgagaaattttcgtcaccttagcaggtgcaatagttggatttatgcttttactgttattaggagttttcggaattcctataattgttaggatattcctcgctgtaatgtgtgcaggtataggatatggtatatcggttcaaaatccacgtactggagtgaacttattagatattttaaaaatgatgaggcaattcaatgcgagacctaaacgattttattacgtttttggtgaagggagagaaagagattaatgagtctttttaagagtaaatctaaaaataatctttcaccggagcaagttgcaactcaaaaaaacaaagcagttgctcaacagtggatgcccgtgatggatattaacaatgaattgcttcatttgaaaaacggttcgattgtaggatttataaaagttcagcctttgaatatggatttattatcaaagaaggaacaacgaagaaaaattaaaagtttaactgaagtttataacgggataactcgtggtcaacaaacattaactattgctagaccagttgatttagatggttatatttataggttacaagagaaaaaggcaaatgaagaaactccagttaaaagaaaaattatagaacaggatattaagcgtgcaattatgatgtctagtggtggtgaggcggtagaacgtcaattttatatcataatatcaagccgaaataacaaagatgatatggatcaggatcagttacgtagaacatgtaatgaaattgcacaagaacttaaaggagcaagtttatccggacaagtatgtgatgatcaaatgattcgtgatttacaattcttatttggaaattcagcacaatcttcagtggaaagagcaccaatagataatggcccatttatacaagctttttataatggtaatgatactgtaaatgatgaggaaaatgagggagcataaaatatggcgaaggtaaaagaaaagaagaaaaagattgctggcaaaaatcaattgtcaggattcttagatgtaattacacctagtgtgataaattttcagcctaaacaattaaactatggggatagatttcaacgtgtacttgttataactgattatcctcaacgtgtaggggaagcgtggctaagtcgaattgcaaatattcctggtgtagtaacgtcaatgcatacggaacctattgacccatatgatttagtaaatgaaattcgtgtttctatgggtgaacttggagccaaaattgaaaatatgggaaatccagtttcaagagaaagggcacaggatcaatatgatgatgcaaaggcaattttaaaaaagattgatagagaacagcaaaaagtaatgttaatgacggtggtacttttagtatcagctgaagatttagatgaattaaatacgagatgccgaagagtagaaagtatgcttgcagcagcagggttaagggcaagaacaccgatgtttctacaagaagaaggattaagaactgtaggcccatgggggatgatggaaaatcgaattaaagatataggagctagaaatatgccagctgagtccgtagcagcaggcttcccatttgtatattcaggtcttaatgacggtgaaggtattttattaggtactgataaaggtggagggattattctttgtgatttctggactaggcgagaaagtagaacaaactcaaatctaactgttatcggccgcccaggtgtaggaaagagtacagctgttaaaaagattttgcgtggtgagtatggtcgtggaacaaaaattatcattatagacccagaagatgaatatggtgatttagcaagaaatatggatggggatgctattgattgtgggggatcacaagaaagtcgaataaaccccctacagataagagatgtcccattagatgataaagatgaaaaagaaaagttatatgaagaagttgaaggaaataatagtggcccattagcgtatcactttcaattcttacgaacatttttcaaactatatttaggtaatataagtagaagagatatgagtttattggaagtagccttagaagcattgtataactcaaaaggtattaattgggctactaatccacaagacatacctaatgaacagtatccaacattaaaagatttatactttatactattagatttatcgaaggaaaatgtggaggaacttacaaaaaaatggggagacttatccaacgtttctctaacgggtgcaaatagcaaggattggcttgatctatctattttattaagatcagcagcggtaggagcagattcatttttatggagtggaccgactacaattaatcctaaatcagattttgttgtattaaatattaagaacttactagaggcgaatgatgagattagaagggcacaattttataatgttttaggttgggcctggaatgaggtttcaaaaaatagaaaagaaaaggttttacttggtgtggatgaatgttacttattaattgatcctgaagtcccagaaacaattaagtttttacgaaatacctcaaaacgtattcgtaaatatgaaggcggtttaatggtaataacacaggatttagtagatttcttagatccagctgtaaagcgatatggacaagccttactaaataaccctgtatataaaattttactaggacaaggtgaaaaagatattgaagcattagaaaaattaatgactttatcagaaagagaaatacatacattatcagaagggaataggggagaagctctatttattgctggtaatagacgaatgcatttaaaaatagatatttctccagaagaattaattatgtttggtgaggctggaggccgttaatagaattaaggtgaaatataaatatatttgttcttaaaagaacgtagagtttgttttattaggtaattattactactctatgttctttttagaacgttttagaaggtgaaacggtgatttacttaaaggcagctttacttttaaaagattattggaaaccaattttgatggtcttgataactgggattgttttagtgttattaggcccttttcttttgctaacatcttcaactccaggtggcaaagaggaaactattaaaaaatatatagaggtagcaactaatttacagattaattgggtagaactggtcgcatttgatatggtcaagtacgaaaatcatttagacggaaaagatcctcatgattcagcttatcattttataaagcttaaatatgaagaatataaaacagaagaaaaatgtattaaaacaaacaaagaaactggtcaatgtgaagagaaacaaacgcaagaaatagttacatctagtaaagaaattaaagggaaaaaggcagttcaagatttttttgcgaaatttaatctttcaggaaatagtataagtaacaatataaagaagattagcgatatgcctggaaaacgtgtaataagttcctctgtaacattagatgaggcgatggatgatgctaagtttacaaaggaacagaaagaatatgttaaaaagctgattgaagcaggaacaatccagcagatgtttcccgatgcaggtacaggaacaggagcggtgtgtacaccaagcggtactttaaataaggaattaattcgtcaacagatggataaagcggggaaatttaaaggaatgacagatgattttataagcatagcggaaaaacataagattgatccagttatttttatttcaatcgcatttcacgaaaccggaagaggaacatcaagggcggttcgagagaaaaataatcctggaggaattatgggaagtggaggactatggactttttctactttacatgagggactagattttatggcaaagaacttatataaactatacatatcacaggggttaacaacaattccaaaaataggtgctaaatatgctcctgtgggtgcaagtaatgacccacagggaatgaataaagattgggtacctgtaacaacacaaatagcaaattcattgggtggactaacgatgaattgtgaagctggaaatcaaggtggaggtatagttttagatggaagtggcggacaaaaatttgatgctaataaagtatatacatctatggcacaattccttggaagaccttatgtttgggcaggtgctaatccagcacaaggttttgattgtagtggtttaatgcaatggaattttagacaggcagctgggataaatcttccacgtacagcgcaagaacaatataatgccacagcaagagtaaataaagaacaattacagcctggggatcttgtatttttctacggcacatacgtagggccaaaagtcacacacgttgggatgtacattggaaatgggaaaatgattaattcaaacagttcgggcataaaaattgataatgtatttgaaggatattggaatagacaatattacggtggtggacgaattgttcgttaagtatctaaaaggagagggacaatttgaaaagtagagtgattataagtgtggcagtcatattatttatgacggtttcttatttatttatatatacttatggggaaaatcgaaaattaaaaaatgaaattgcgaaattccattcagaagaagaggtaaaaacagaaatgaatggatttattaaagagatgtctgaagggaaatccgaggaatttgaaaaatatttgattggtgaagctaaaaagaattttttaagtataaaagaaagaaagcaagaagatttaaaggttaagcaaacagacatccaagagcttagggcaatagcgaaaaatagtgaaaaaactaagattacatcttatgcaacatataggactacatatgatgtaggtacggatgatattcaatccatttatgtacaagctattagtgtaaaggctgagtggattaaaactgataccggttggaaatgtgagcattatgaaattcatttgtagaaaggtagtgtgtaaggatggatggtattatagcacgtcctaaatttgttgaagagataaaagctgctctcgaaagagaggctgcttttataaaaattggtgaatttgaagaagatagttttaagcaagcttgtttttcagcagctcaggtttcgttaaagctacttttaattgatataggggttacagatagtgctagtttgataactggaattaaatctattcgtgctagtaagccatctataagaattgtattattagcgatagataaagagccaggcgataaaacggtagcagctgttgtgagtatgggcattacagatgtaataccgttatcgactgaaactatagatgaaaaagggaaggagcgagaaaacttcacgcctttaatagaaaagcatattaagaggaatacaacatatgctgatgttgttagatggcattatgaagtaggaaatgaattttctacttctaatgaaaagataaaaaccaagatacttacaaaaaagcaggttatagagaaaaaaatttatgaaacaaaaaccgaggtagtatccgttgcaaataaaaatatagcaatatgcggtttaagttcgaaatcaggtagtagttttgtgtctatgaatcttgcaatggcaatgagtgattatgatctagcaatttctatagtagaaccaccaataaatccgtatttttttgatacattgttactacatgaacacgaagaagaggataatcaattcatgtcaattcctcacatgattaaacaaaatgaaatcggaaacaaggagtttaataataaggtctttgatatttattggaatgtagctgatactagaaaaagtaaaattggtgaatggggaattaatgaattaataaaacaaatacattttgagaaaaaggcaattaatattgtagactttggggagaatgtaccactagatgcatttagctatatggattatatatttattataatagatcctcaaccgtatttaatcgccaaggaaatagataaagtaatgaattttgtaaaattaaagcaggaaggccacccaatatattttatctttaataagatgaataaaggggtagatggtaaaggtttatgtaattctctaggattagaaggggttataaatattccacatatagatcccgtaattacatataactgtctatacgatggtaggattccatttgagcataaagatatagatgaagaatttgtagatagtatggatattataataaaagaggttataggtaataagtactataagaaggagaaaaaaacttctctgtttaatagattttttaagaagtgaaatatagtgaatttaatttaatatttataaaaaaagaattggaatataggttgatagtcctggtgaacacctatatttcagttcttttttatattgataaattttatttgtaaaaaatgtgtacattaattttaaatatgctataatgttcctaaaggaacattattagtcatatataactaataaataattttttatgtagttacaaatacctaatattgatgttgagtagttgggggttggtacatgagtctactcatagtttcgctgtttattacatatatgctctttaacatttatacagattttctgtacttaaaaactaaaggttactggcatcttatatttttagttctttgtatctgtctgggcgtaataacacatataaaattattagatctaatgtgtgtagtttgcgtttcactagttgtagggatattgcgagagaatatgaaactaattcgtttttctcctggtgacacaaagatgattattgttgcatctttgttttatttcctaattagtccagaggaaggcgtattatatacagcattaatagtgcatattgcaattttcatgtgctcatcaattttgacaggatttattactttgttattgcttttcaaatcttttatacgatttaaaacaataactggatatcacagtattaaatttaaaaaaatgaatatctcgctagtgacagatgggtggaaggtaactcgtatgtactattgtttgccagcagctatttcagtgctagggggtgttataccattaattctaatgtcattgaaataaatgaatgcattgctggttttacgcaatgattgtatattagaataatggaattaaaaaggaggaaatttataatgaaaaagaaattattaactacagcaacagcattgactattatggggacagcagttttagggacaggagcttcagttaatgcggctgataatacagattcattaaaatataatgatgttccagcaaatcactggtctacgaaggcaatttacgatttaacaaaccgtaaagtagtgcaaggttatggaaataatgtctttggttttggtgacaatgtaactcgtggacaagtagcacgtatgatttatacatacgtaaaaccagcggatgcagatgctagtttcaaaaatccttttactgatattaaaggacatttgtttgaaaaagagattttagcagttgctaaagcaggacttgtgaaaggatttggtgatggtaagtatggaccagatgatatcttaactcgtgagcaaatggcacaagtacttacaaatgcttttaaatttaagggtacgaaaacaacaaaatttgcagatgttgataaaaattcttgggcttatggtgcaatcagtgcattagaagaaaatggagttacaattggtacaggaggtaatatgtattcaccacaaatgcatgtaacacgtgaagcatatagtcagttcctttataactctattaatgtagtagaaaagaaaaaacctgagactaagccagaagtgaagccagaggaaaaacctgagactaagccagaggtgaagccagaggaaaaacctgagactaagccagaagtgaagccagaggaaaaaccagaaacaaagccagaacaaaaattacctgaggggttaaaccaggagttaacaacaccagaaacaaagtttaatgaaacagcatttaataatttaccgattgctcaaaaatcagtttcaagtggcgctcaaaacattgttaaatctgtcaattctacatacggtacaaatttgaaatttaatgaaattggtgtatcagtagcacttaaagaccagggaatgtatttaccagcaggtacatttaattcacaatttttagttgaaggcgtaaataaagatgaattcgaaatttactttttaggaaataacgctgcaactgtagaacttgctaaacaatgggttaatctattaaatccatcacttaacttagattcagagattgatagtgtagtagcaactcataaaattagtaactatgaaaaagaaaataacaaaataagaattgggctatcaacagcggatcaaatgctttatatccgtgtagaatctaaataatttaaattaatttatggcatacgaactagataaaaataaattaaactagttcgtatgccaccaatacacgaaaggaggaaaatcgtgtatagagtaagacctttgttgtttttattgatatttatattctcgttactagttcccaatgcagctagtgctagaaataatgatgttccattctataatggaactccagatacggaactaacttctaggcagttacaaatacctggtaagttacttcgaccaggtaaaggatatacacccccaggaagtgagaatatatattatacagctgacatacattatccagcattgtataatggtgcatttaattttggtaatcatcatgaaaacttgattaaaaacactgaatcttcagagccttttgtcaatttaattaatgatggagttatagggagtggaaatcctataggtaatcggatggtcactgaagtggaaagaatgaatgcttctatagtatccaatatttattttggtaatggagattttgtattaggtaatataaataaacatactatatcccatgaagaaacaggtaaaagatatggtaatttttattggataagagatatagcttatttaagtgggggatatgctggtgcaggtttaagtagggaaattaatccatataacatatggattgtcaggacgagtttcccagatataactaaattcagtgcaacaaatggctccaaatcaaatccagtgttttttgatctagagggctatgaatatgtttcaaaaaacaaaggttacacagataatgacccgaatagtaccacgactaatccatacgaagaaagtgctggggaaagaaaccgggtacattggttcttagaaatttataaagatggggatttggtagataagaaaaacggatatatgcgctcgaaaccaaaaagtaatccatctaaagcgaatgagaaagaatcaggtcactttgtaaatgacaatgtgaatccaatagggtggcaacctgagtcgtgtggaagatttactgctaaaataaaggttctagatggtgttcaaaggacttcccaggaaaaaacaattacctttacagtcgatggggattgcgatgataaaccaactactaatccggatgataatatgtgcaaagatgattttaagtataaaatggactttgctgtagatcgaattgaaggagaaacagcagaaaaaggaacaaatatttctactcctgtaaaagtatctagagccaattttaaagaggaaagggataaatataggggtgaattaaaagagaagattaactctctacaatcagaagtaaatagtcttaaagatgatagagatagtacacggtctaatttaaagtcatgtcgtttggatcaaacttgctatgtggatgaaaaaggaaaacagcattgttacccaagagattgttcatggtgggaagaacgtttagatagtattctattaagacttcagaaagcggaagaaaaattagaatgcgaaacaaataaattaaaacgacttgaaacattagaagctcagtacaattcaacagaacctaacgtcaccttaagttttgatggtgatagggtaggggcgcagaatgttaccttaaaggaaggagagagtaaaaccataagctttgattggtcattaaaaagatctggtcaaatagaagctgaaattaatccgataccacgaaaatatgataacagtaaagatgttaaaaagacgaactttaagaataataaactagatacacctatatacacatctagtcatcaagtgtcattatgtcctcggcctggagaaaaagctagtattcatgctgtagtaagaacaataaatgacaagggaacaaaggataacctctatgaatatctgacaggtgagataattaatttatccagaaaaacattgagatcgggatatggatttagttatgaggtgaaaacaacttattctaatgaagatcctaaaagtagtgcaacagggcctaaaaatacagattcatttttcccaacaatgactaagcatttgcaatatccaaaagttgatgatggatataaagtgcaaatggaaaagacggaaaattctgtaagtgaatcggtttggtcactcccaatgacatatgttgaaaagttttcaggtaatgtctttgataaagactataaaaatcacccagcttataatccaaaagagataattctaaatggtggtcgaaagtggtatacatcttttgatcaaaaagatgggaaatatgcttttaatattaaatcttataatgctggagtaaataaattaaacttatgtctaactggcgaagtgatgattgaaggttcatttattggaaataaaaagggcgaagatgattttattagaagatcagtaaatccgagtaatccattccctgataaggtgggatggaattggcaaggaaaagaaacaatgttaacaagtttaaataattggtggacaaattggaaatatccgaatcctaaagatattcctccaggttatcataaagaatcttataaaattagtcctgaaatttaccaatctattaaagcatataataaatctcatggattaaatgtggatttaaatagtgaattctttagcaagtttaaccttaaataacctaaaaagggtgatgtaattgagtgcccctaagtttgtaataatggctcttgtattgcttggatttacattgtttattgcaagttcaagttatttgtttgcagctgatacaaatgaggacagaactttagaacaggcagcagcaagcgctatgagccagggtattaatatgggacaggttagggtggatgaagaagttacagttaatgaggatgtagtaaaagaggctcttgtgagacagtatgtagagcaatcaaatctaagtgatggtgagaagcaattacatatatatgctcttgcttctcagccatccatgcttgctgtagaatcttataacacttttgatcttccgatacgtaaatacctaaaagaagaagatgaaaaagctagtgttcgacaatttgctaacattatatttgaagcaaaaaaattgaaaaaacctaattaataggagttggaagatgtgaaaaaaaagagtacgcctaagaagttagctattactttagcagcttcaataggattagtagttgcgattgttggatacgagaattatgccgtttctagcaaggtcaatttacaaaaagtatattttactaaggttgatattccacctagaaccaagataaccaaagatatgttacaagtacgtgaagtatcaaatagctccattccccctaatgcgattaaaaatccgaatgacattgtagggaaatatactgtaaatggttttgggttagtcgagaattcatatgtttttaagaataaagtggtatctaaagatgagcttccagatgcagctattttaaacttaaaaccaagtgaagtggcatttcctctattagtagatattgagacttcttcagggaatagtattattccagaaagtcacgtggatctgtactttaagggaacagttaaggataaagatgaaaaaggtgaggttgtagaaaagcctatctttggccgcattgcaaaacatgtaagagtaacagcggttaaagatagtaatgcagcaaatgtttttgatcctgcaactataaatgtggaaggttcatatcaggatagcttaaaagaagaagcgaaaaatcgccctatggcaaagatttatacattcgcagtgaatgaagaagaaaatacattgctaaatcaaggtacattaattgggaaaataatccctgttgcaagtggaacagcatataaaacaaatgttgaaaaaacagcagatgaacaaattgtaaaatggatacaaaaacaatcgtacaaagtgaaataagagagtgagggatagacatggggagtaataatcccaaaattatcggcgtatttggtatagagcaaaatattggtaaggctacattatctcatgcgttatcaaaaataattgcagaaaatcaacataaagtattgtttgttgagttagattattcaaatccttcgtttgccaataaaacccaaatacctcttggtgatagacatatgggaaaatttatggaagaagctattttgtataatcaattaaatcttgaaaattacatttttagaaaaaaagatattcatagtaacacaaaacaatttgattggttgcccagttcattggatttactagtttatccaaaggagtatcaagcatccgaatttccagattttcaaaatgatagcgaagaaattatcattaaattcgtagaaaaattaatgaatagaatcaagagtttagactacgatgcagttatttttaaccttccatgtgaaattgacgatatttttggattaccaatattacgtaaatgtgaatatgtgattaatgtattgaatggtagccctaaatatctatcgagatatatggaattaacaaatgtctttgaacaagctgatttacaatacaagaaatggatacaagtatttaatctttgtagtagtaatataggtaaggatatttacggagaattaactgagttaaatatttctgaatgcattccgtattgcaatgaacgagctgaatttgaatttgctttgaaggtgggctctcctataattgatttgcatttgaaaactatttctcgtcaacttggtttcttcattaaacaagaagaaaaaagaggtggcattaacaaactatggagatcgtaaagaaaaatattatcaatttagagaagtatggtcatagtccagggaaaaagaaaaaaattgatattgagaagtatatttatactattaaagcaagtaatagtataggtgttaatcatgaaaaggaactaccggaagaatatttaaaagaagtaaaagatttcttgaaaaatgaacataaatcattacttcaagaatcctttggtgatgaaaaaaagaaagctgcactaaggaaagtggtttctcaatatcttattgaaaaacctaatcttccagggttttcgctagatgaactaaccaaattattagtggatgctgtagctggtttagatattttggaagcttttgcagaaaatccaaatgtaactgatattgtttgtaatgactatgatgaaatatggattactgatcttaaggaaggaaagtacctttctgatattaagtttaaagatagaaaagcatatgaaacattatgttataagtttgcatatgcatctgggcaaacttggtcatattcaaaaccagagtgtgatgcttttttccctaacatgcgcattaacttaatgggatttgatatttcacaagagggtatttcacttgcgattcgtaagtttactaagggtttaagaattagtcgagagtcgattttagaaacacagcaagcaaatgaaattatgatagatttattgaaagctattgtgagaacacgcagtagaatattaatttcaggatcaacaggagcaggtaaaacggaattattaaagtatttagtgggttacatttttaaattggatagagttctgatggtccaggatagcccggaggtcttcttaaaatttatttatccagaccgtgacattaaaacttggataacaagagaaaaagaaggggttgaaaatgttattgacttagatcgactaaaccgatccgcactacgccaatttataaaatggctaattattggggagtctcgtggtggagaagcttggagtatggttaaatcagccaaaacaggacacccagttatgacatcattacattcttttggtgcaattgatagtattgaaagggttgtagacatgtgttcagagaaagttaatatgtcattagagtcattatatagaagtgtagcaaataactttgatttcggtattcatctagaacaaacactggatggaacaagaagaattacggaaatagttgaatacacaggttataaaaatggggaagtacagtacaataagttattttcttttgatatagaagcagaaacagagtatgaagatgaaaaaggtagaactagattcaaagtagatggatgtcataaacagactggctatttaagtgatttcagaattaaagagatgaaaaaggccagagtttttactaaacaattagaagatttacaaaaggatagggagaaagaagacctacctaagggaggggcagcagttgcagtatcttaaatatttaccatatttaattatgattgcagccatctattatgttatcaatgcgaatctagatagcatacaaaataaaaagaaaaatgcattgaaatatgttttaaataataaatcaaaggatagtaaatttattacatatcttaagaaaaaaggattatataagtggattagccctaatcagattattcatgagggtaaagaattcaattggaatttaacaattaaagattatagtatgcttttaattgtaggttcattaattggggtaataatattttatgggttttttatctcggtgaattttgctgtttttggtgtgatagtaggattagttttaccgagaattatgatgttttataaaaagaaacgatatgaactatatgttgaagaacagttgatgttgtacttaaattcacttgcaaatgcgatgtcagcatatgaaaaccctagctttgcgattaaaagtatattgcctttaatgcagtcacctattaaagaagatgttgaaaattgtttaatcgtacatttagaaggaactagtattaaagaatcttttgaaccgctgattaacaagtataaatacaagaatcttaagttatttcatgacatgttggatcttatctctaaaacaggaaaagatgaagatggcttgttaatgagaatagcggatgaatttcagcaaaaaaagatatataaagccaaattaaaagcaggaatggagccaaaacgatcttcatttaaaaaaattgctattatgacagcatcatttccattcatgtttttagcagttacagcagatgattacattgcttttgcagggacaccgacagggaaaataatacttacattaatgattcttgtaaacattatctgtgcagttaaagtcgagcaacattcattctatgatccaacagaaggtataaataaaataagttaaagaaggggataaagtgaatctattaaccacgattccactgtttctcttgctgttctcactaatatatttagtagtggattatgcatttgaaagaagaaataataaaaaatttcaaatacataaatatataggacggtataggaagaatgaggaaaatcgaacatttctattcatgctctttgaaccaattctaaagcttaaaaaaaattggatacctcaaagaatggaagaggaactaaatataaaattagataaagcaaatctaaagattacaccaattgaatttttgctaaaaaaattagtaatatcaatatttgttttcctatttgcgcttatatatgcatggatatttccacaatataagctaattatcttaacagtaggcttaataatttcagctctggttttcttttatgaaaacgtaaggttgaacagtatcattaagtctagggaattaaggttggagctagagttaccagagctcatgattcctctagggtttatgctttctaaattttcagcctttgaagcgacaaaaagatcaattgagtacgcatctgatagtataaaaccttatgcagaggaattggttgctaaattagaactggaacctggtagccatgagccttatatagaatttgcaaaagcactaaatattccatccgcttatcaatttatggtagctctagagcaatctatgaagatggatgaagaaaaaagtaaagaaatcataaatgcacaaattgaagtaatgcaaaaactacaatctgaatctcatgataagttagttaaaatgagaccaggattagtttctaaatatattatttttgcttatctaggcatggttattttaattatgggaatatcatttgtttctatatttgataaattcgtcaatctgttttaatagaaggaattaataaattaataaattgctatatgcaattattataaaaaaatacaaaccaaagggagaaatttattatgaaaacattagcaatcgaaacaaaaaaaggaacaggatttttaaacaagggaaaagatctattaagaaaaagtaaatcatggttattaaatgaatcttcagatgaaactacagataaagcagtatggatgtatattggtgtaggagttgctctagtagttttaacaatcctattagtagcaatgaaaacaggaacaggaaatatcgctgacttctttgtaagtgttacaaaaggatctaaagtagaaccttcaggatggggaaaataatagaataatattaatgtaagttatacaagaggggtagtttattataactaccctttctttttagaaaaaggaggccgagattaagtgagtgaggcaatacagtatgttttatttttcattgcgttaatggcaataattttctttggtgctgagtttgctggccatactgtatataatacaaaagcgaatgagctaagtgagtatgcagtaagtctggctgaacgtgaaggggaattttcaccaacagttatagagaaagtaaaaaagaaacttgatgattggaatatggattctgataaatggaaaatggattatacaaaaggtaaagtagactttaaccaacctttaaattttaaaattgaaggtgagtatgaatataaagtattcaatttgattcaaagtggagtcggtgtaaagaaagtatcaatttcaagtacccgtagtggtttaagtcaagtttatttcagaccctagtttttttaatagagattagtggtataaaaatacatagttgtccctttataagtgctttaaagaacatgtaagataccttatactgaaaggagaatgaaaaatagaaaatgaggaatatggtatggatattaaagattatagtataaaaaaatatagaattaggcccgaagcaatgaagctaattaaatatttaaattggaaagagacttctcaaaaagaagaggataagtttttcttagataaaattgtgaatacatatttctcacagattttggcgggacaaattttaattcaaaaagaaaagataagtggacgtaaagatagatcattattattcaaaaatgatactcatcaattaatagataaaaagcattccaaagcaaagtgtacaatgggtgaaacgatagaatttagcctatttatttatgctcaggaaaatttaacttcagaagaattaaagatgaatgatttaaatgcatggaatataacatatagaagggtaagaaaataatattatgttcaaaaaaatattaaataatgttggaatgatactattgggatcggcaattgctatatgtttaatataaagaataaaagcaggtattttatagtcaaactatagaatatctgcttttatttttgtgaaaatgcctattttcagaagacaaataaaaaatgggttttcagattcctttatatgcgtgtttcaaaggaatatccatggttttggtttagaaggacagaaaatgtatttaaacgaagaataagaacagtatagataattcgataatttcacgtaccctatttttctatttttttaacaataactatttttccagatgtatggttaatctttgggatgaggatacctttatctaaaaaatccttcttactttttaattgagcttgcactaaatcctctatgggattttttttaaatgtaaaacgctttttagatcgcttataatatttccaataaaacgtagtactttttaaccgtttattttttttagctaatgtttttaaagaaaatcctttaatttttccagaagagctattagcaacaataaatttattttttttattatcatagccatataggggaatccaatgtgaaatcatagatcctttttttaagaatctgtataatttaatcggattccaccaggaaataggggtagcaatgctgaataagacaaaacaattttgtttttgtatgtcctcaataacactgatatcatctaaataattaatatctttaattttaatatcataatcgatatttttatagatgaaagtatttttgattttattaagaaaggagatatacgattcaaaatcaaaaaattcacctacaaaagtagttcctgttttaatatttgattcatctttaacaatattagcctctaagaatgaatacaccattttatcagcttgttcctttgaaacatctttcttctgattaatatggtacattccatttataaaagcataaattccacaagtgggacctgtttgtttaatacattgagccattaagacccccctttttttcaaaacgttgatttaaaaacaaaaggcagccgtaattcacagctaccttttcaattatttgataaaacaccaggtaaattatgaagctaaacgtccctcaatttcatcatatttaacttttgcagtttgtagaactttgtctaatttagctaaaatttcattttcttcatcaagggagagtgctgattcttgacggctaaaaccatttaattctacttcaataagtagtaatttttctgtaatatcattatgtatagtggaagtatcattgcatatatccctaatctgtttcgctagctcactatacttactttgatagttagtaccacgagcttgcatatcacgaaatttttcactcccaatagtccttatttcagaaatactagtggtgaccacttgaagtattttttctagctcagatctttttttatgatcatttaacttatctagaagagcacttgctgtattagctgctgttgaggctcttttactgctaaatgtaccccatgcagcagaaccaatagcaatggcactactaactatactaactgcattattagtattacttacaatatcccatacagacattactaaatctctctcttaacatatttgtatttttccatacctctataaagctcgttaaacacttcttcccaacgcttgttttcccaaaaagcataagtaatagcttcagcaaaatgataaccgtgatcaggcacaatagcatttatttgcatttcaaactcatgatgagacacttgtttaccttcaccaatcatttttctgtattcgtccataagatccattatttgtgtgaattgtatttgagtgagatcgtaatcaaatactaatcgttctacacttccattggtaaataataaattttgcttaaatgttaaatgtgcaacttgttgttttagctgttcaatttcatctaatagtgctttgttttccatatatagttcctccaaattattttgtatttattatggttttttttacccaatcattatctttaatttcttcatcaattaaacttacaatttcttgtagggcatcatctaatgtttcaaaacaagagggattacaaacagctgtactaacttctttattagtttcaataattttagcttgtgcagcatactcattttcatcgaaacataatatttctattgtggccattgttcttccagcgactacaatattaaaatattttttttcaaataattgaattggtagtgtagatttaatatgtttcatagaatcatcctttctaaaatgtatttgcaacatataaatatattataaataataatataaaaatattccatttcatcgaattaattggcttttttggttaaagcattaattttttctgtaggcatatattatgaaggaatgataaaagggggcactaaatatggacatttactcattataccattacgtaagtaaaccaattataattgaacataatgtaggagcaagttatcctaatccgttaacagtgtatataacgaaagtaaataatgatcaaagtatagaggtaatttgtacaaattctttaggacttatggttagtgagaaatttactcaaactcaaattactaaatatacttgtttgtaattagaaaggagtttggatatgcaaaatttagagtacagtcaaaggcttgtaggtccagaatattttcaagggtacttaagtagacaaatcaatatattcacaataaatggtaattataatgtttatccattgcatgtagacagtcaaaatttatattgtacagaaaatggtacaatgctagcaatgatagtacctttaggacatataacgtctatacaatgtgtaatataaggatcttatatgcgagtatttacaatagttataaccctttggaattccagataaaaacgataaataacaatgtataatagaattataaaaacgataaataacaaattagttttagaaagaagttaaaggtataattagttaatgtagtttgtaaaagaattaatacatgactaaagtctttcaatttatatattaatttacattaatctaatatataaattgattaatttgttcaaagggagagaaacaaatgcaggtaatttttgaaatgattaaagatggtcaaaatctaaatagtgaattgaacaaacttgttgtcgaaccttatattgcagaaacaggtattaaacgagaagaaattaacctaagcgatttagcaaaatggatggaggataaagtgaaaaatgaaagatgataataaggaaataatatataacaaagaaaaaatcattacatctattgatgatatttctttattacaagataagctacaagaggaacaaaaagaatttaaagctatttgttctttaaccagggagtttagaaatcttattaaaaaggtgatgtagataatgagagaacgtgagaattcagataaacccatccgttgtttttgttgtgacaagtctattttaatagaatcagcaaaacttatggatggactttattgctgtaacgattgttttgaaaagcgtaaagacataatacttagacatagaacatctaaaatgaatttatttcttgtagaagagcaattaaaagagttagatgttaagtgtaaagtaaaactaatttcttcggatgaagatgttgaataaaggaatagaggaatatctacgttaatcaaatttgaattttgtagaaaggagaaatgaaatgaattcatttttattagtgccaattatttttatggcatttgtatttctattcataatgctatgcttgttagtaaatgtaatttttctttattttgaaaaggaattacctgatttattgaagttggcattaccaggaatgcttacgtgtctaattttgcttttatttcttcattttataaaataagttatttatacaaatgttgtttactaattttatgaaatttgaattttgtagaaaaggggaatgagagatgttgaaaaaaggcgataaagtagtgatgcatacatgcggagaagcgcaacactatgacggtaaaatttggacttgtacaactgatgaattcgtaagaggtgaaggtgtatacacgcaaaacttagtttttttagaagaatttagtgggtgtttcttagctaaatatctccaaagggtaaaatttgtacaaaaggggattatttaatgaaaaatagaaagttttttatgaaattgtcatgtgttatagcactttctatggtaggaggatgctctagttttaacatatctaataaagaatcaacagtacaaaattcatcacaattaccaaaagaaagcgattattcaaattcaagattcaaggcaatagagcttgatagttatacacttgtcttaattgataaacaaacaaaagttcaatatttaaaagtagctcgaaatgaaggatttgatggtggattagatattgtacctttgtatcaagcaaatggtaaaccatatgtaggtaacgaagtgaaagacaatcgtttttccacaaaagaaatagatgattatacttttattatcactgatgaagaaacaaaagttcaatatttaaaagtagctcgaaatgcaggatttgatggtggagttgtaatagaacctttattaaatccagaaggcggattactaacagctcaataaaatttgaattgtttataattttttctacaataggaggctataaaatggatgcgataccagaattaataacaaagaatgattggaatttactatgttgggatgatagatatagtagggggatatgggctatagttacacctcatccaaaccatatgtataaaataagagagattatagatggtgaagggatgctaagtacggaattagggttttatttccagaatgaaggttcttggctccctgttgctaatggaaataatctaatggatgttttaacgaagctcgatgacaaaattaaaccgatgattggcaacactatatggaaaaggagtgtatatgacacttttcaacactttcttgaagaaaactatagtaatttcggcttggaaattgctcttaaaaataaagtgaagattttattaaaaccagaggaattataaagggttatatcaaaaaatgattttcaaatcagaaaggaataataatatgagtgaattatataacaaacgtattaagcaagcttatgaaaatgcaaaaggatctatggagattgaaggctttagatttacagattctgatgaaaaactaattaccgcttatctaaaaaaagaaatcacaaaagaaacatttattaaaattgcgagggagcgtgctagaaaacatggtaaataaatctctttacacatacgatggcacagatgttttaaaaaataaatttggtattaaggatcaagcggaattagaagaattagaaaaattgataactacggccaaaatcgcagaattagaaattaagccaatccagggtaattttgatcttgatcatcttaaaaagatacataaacatattttcgaagacatttatgaatttgctggccaaatacgacaagaaaatatagcaaaagatttcttctcttttggtgatgctagattcattgaatcaggggcaaaagaactatttggtcaactaaaacaagaaaattacttgaaggttatgagtccggaaaagttttctgaaagagcagcccattatctagcagaaataaatgtactacatcctttccgagaaggaaatggtaggagccaacgtgaattcactagaacattggccaaaaatgctgattataaaattgaatggaatagggtttcaaaaagagaaatgatggatgcgatgattaaatctcatgtaaacacaaaagaactcgaaaatcttattaagtcagtgataacaccaatacaaaagaaccctgaaaaaacattgattagaaaccaaaataaaagtttggaaaggggataaatctatatgcaattagactattttagtctaaataaaatcttaatttggatcggcataggaatgttgatatgtttctttctaaaaaaaataagtaattatattagcaattggttctatctaaggagattatataaaggcagcgatatatcgaaaagtaagtgtgaaaaattttatgtgggtgaaatttcgaaagaagatttaggggaatgggagaaaacgcttaaagacttagatgtcttaattcctttatctaatcgtaatgaatctataccagctattataaattatgatttagggataatgtattctacatctaaagagatgttttcagagtatctcacattatatcatccagagcatgaaaaaataagatttcaatctgaacaactaacagagcttagagaaagaattcttcaaaaatatctacatgaattaatttatgaatccttaaattgtttggataatgaattagataatgttcacaatataaaagagaaaattgccagcataatagatactcaaaatagtagcaaggattatattgtatcaaagagttgcgaagagatttcgagtgaagaactaattaatgtactaagagaaatcagccagtatgtaccttgtattaaatttgaaacatggcacaaacgattaagtttttgtataaaaattgctgaagataatcaacgtttatcaagagagggaaaataaatatgtatatgacggtagaaattaacatgcatttaaatagaaaattatcacataaggacacgactgctatagcaaagaagcttggcgactttggaacgatggatgattatgtgaattttgaaggggattcacttatatttaaaatgactaaagagaaaaatagaaagtatataactaagctgctttcttttttagaacaatttttagaggatacggatgtaaacaaaataggaatgataagtatagaagcagaagagaataataatcttctcatttatgcctttaaaaagcatatttttattactattgaaggaatcaaagaggggaaaagaagctataaaatttttgatgtgaaaggcaatgaatataagtataatatggaaggaacagaacaagttcctattgaaaatcatgtggctgcaacatattttttacattattgtaaataaggtttttaaagtagagaggattaaaatgaaattcttcactttttcttactaaaaggaaaaacatgttccttagagaacatgtataataagaacagtaagagaagggagaagaacacatgagcgaacagggatattggagtaaagagatctctgagctattacaaattggggatagtacactgagaaagtggtgtattgctctagaaaatcaaaaatatatatttattcgtggccgaaataatagtagggcttttgttgataaagatattattgttttgaaacgaatgaaagaacttgtacaagaaaaaagtataaatttagaagtagcagcacaaatattagtagcaggtatgaatcctgaagaaagaacaatgggcgttcctgaagaggaacgccctggaaactatctacagaccataaatatagaagttcaaaagctagaacagatattagaacaacaaaaacagcaagaagattttaataaagcacttttaaaaaaacttgaagaacagcataaatactttgaagaacggatgaacgaacgggaaaaaagggcagaagaacgagataatttactcttacaaaatataagagaaatgcaagaaacaaaaaaattaatagcagctagtgagcaaaaaaggaaaggcttttttagcaggttgtttagaaatacttaacaaacggtaagataagtgttggagaattaaacgaattcattatttaactacatataaaagagtattcatgtagttattagcagattataaatagagaataaatgaaggtgatacctttagggaaaggtaatgttaggtgattgttttatggaaaattatataatttggttgaaagaacaaggaaaaagagagaatacaattaagcaatatgaaactacattaaaagagtttattcagtggtatgaagatacaaatggggttgtattccagggagagtcgattacacctatggatcttcaagagtggaaacaatttctaatggaagttgcaaaaacaaatagtggaaaacaattatcagtttctacagtttctacaaaaattggtcgagtaaaaccatattttaaatttttatatgaaacgaatagaacgcagacaaatctaggtgcaatggtaaaacaacctaaaattcaaaataaaaatgatgctaaatggcttgatcgtatttctaaaaataggcttatgaggtacctagaggatgttgaattaattaagaaaaatccttggaaaaactataggaatttggcaatagttaatataatgttacaggctggattaagagtcagtgaggtatccaaattaaaactagacgatattgaagatggttttatttctgtacgggatggaaaaggtggaaaagccagaaagattcctatgaattcagatgtagtcaatagcattaataaatggaaagaacatagacaaatacatcaagcttttaaagaaaatcaaacagaatatctttttgtctctcaaaaaaatggtccactatcagttgtaggaatagaaaatatctttaagacaattcgtaagcatacgggattggaggaactaacaccgcatgtacttagacatacttttggccatgatttagtacaaaaaggtattccaatttcatatgtagctgaattgatgggacatacggatataaatacaaccaaaatttatgttacagctggccagcaagaaaaacaagaagctgtagaaaagttagcctctggaaagtatacaaaatagtttctctacttaaaaggttgtagtacttggaaatatttcagtactacaaccttttaagtaaaataaattaaaagcaagaaacctttaaattatcacgggggaagaaatgaaggtggaaaaatgaccggtaattttcttgtagacagttttatacttattgcatcggtaggatatttgagttgtattttatacaagctaattataaatataagtgaagatgaacatgaataatttattaacacctaattttatagataaaaatacctaattaattaatttttatatggtataatatacctaacgtagttctttaaagaactctattttgcaaatagcttagaatatctaaatctaaatttatttttttgaaaaggagtaatttaattgagagatattttacaagtgagagaaatttataatgtatgacggtgctttttttagaggatgtttcaatggtttaaaactagttgctccattttggttgattattggtttattagtttatatgaacatccagtaatggattataagtaatttttaggaggtaaattgatgggaaaaacattatttattgcagaaaaatataaagtagcacagaaactattaaaatctccacgtttcaaaaatttaaaaaaggtaaatggcacaatgccttactatggttattttgaaaatgaggactatattgtaagttggtgccagggccatttattaagattaaaatatccagaagaaattgatagtaagtataaagaatttgattttgaacatttgccaattcttctagaaccacatcttaaagttatagaagaaactgaagaacaactgaatatcttagtagaactattaaatagagaagatgttgatttagtggttaactcatgtgataaggacaaggaaggagaattaatctatcgtgaagtttatagctatgcaggcgtagataaaaatgaaaaaaggatattcacagcatcatatgagccagcagaactagaggcagcgctaaataacttgttaccaggagaagagtttgatgcgttagcatcggcagcaaatgcaaggcagtatttagattatgcccttggaatcaatataaccaggggatgtacaactaaactagctaataatcaatttttattaagttctggacgagtacaaatgtgcttacttaatgaaatacgccaacgtgaaatagctagacaaaattataaggaacaaacttcttataatttaaaagtcttaacagctccaggatgcacagctgtaatgaaaactgaagaacaaattttagactcagctccattaatacaattagcaactagaattaaagatacacagttagtcgtaaaagaatttagtgaaaaggaaagaaaaaaacaatctaaatcactatataatttaacggatatttacaaggatgctttagcaaaactaaagatcagtcctgaagtcgctaataaacatattcaacatctatatgaggaaggatttatttcttatcctagatcatcatcaagacatttaccaagggaacaagttaataaagtaaaagaaataatcactgttctagaagaatctaactataaagaatttgcaaacatgattgatatttcaacggtttctgagaaacattcatcatttaatgatgaattagttaatagtcattatgctgttattcctacgactaaaaaatatgatggtgcaaataaaaatgaactagagcaaaaactatacgaacttattgtaaaacgatttattagcaattttatgccgcctgctatatatcttgtgcgtgaagcatcctttgttgatcaagaaggtaatgaatatgtatcaaaggaaagacttttacaggaaaaagggtttttaagtgtattccaagaggatgaagaagacgacgacgtaaaagaatttaaaatcccaatgctaagtgaaaatgatcgtttattaattgttaatcatgaattaataacatctaaatctaaaaaaccagcattacatacggaaagtacaatgttaacttttatggagtcagccggaaagaaattagaggatcaaaacttgaaagaattaatgaaaggaaaacgtattgggactgtagcaacagaagctaaattcatcccaaccttagaaaatagaggatatattgctattgaaaatggaaaaattagtacgactgagattggaagagcatttgtagacactttcccagtagaacaggtaaaaaaccctgagtatacagcggaattagaaggtatgattacatccattgaaaataaagaaatggactataacgaatttgtcttgcaaacaaattcgtttgtagaaaaggtagttgaacagttagggaatatagatagtaatgtggcaattagaatggtaaatacccataataaacaaatagaaatatgcacttgtacatgtaaaaagggaaaaatcattaacaaaggaaaattctatggatgtagtacttatccaaattgtgaaatgtctattcctaaaaagataaagggaaagaatattccagaagaacaaataaaaaaactttttaaagataaaaaaacagatttaattaaagggtttgaatcagagaaggggaaatttgatgcatatctagcctttcatgaaggaagggtgcgattagcactccctacaatagatgaattatcattaggcagatgtccaaaatgtcagaagggtaaaattctttcaaaagaaaaattttatggatgcagtgattataaaaatggttgtgattattcctttcctattaaattaaagggaaaactcattcctaaagcacaaataaaaaaattgtttagtgggcaaaaaacagattttatcaatggatttcaatctgaaaagggagaatatacggctgcactacaattaaaggatggtaagccaacatttatatttcctacaatagatgatcgtacattaggtaaatgtccactttgtagaagcagggtacttgtaggaacaacaaattataaatgtgaacactataataaaacatgtgattttaagattaacggaacatatctaggtaaaaatattacaaataaccatataaaaaaattattagaaaagaacttaacagatatgataaaaggtctcaaatctaataaaacaggtaaagaatttgatgcccgattatcatatagcgtagcacaaaagcggttaacatgtatttttgagaaataggataccagtttatattttcatattgctagataaagggagtttgaaaaatgttgagatctagttattgtacttcgataggataccatattggtaacctagaagttgaaatagtcatagatacaaattatcaaacaaaagaagaagctgaaaaattggaaaataacacttctcttcaccaggcaaagttagataaagaaaaactagtaataaatgattcaattattataaacaaagatgatattgatagataccagtttagattatgcaaagtatggaatcccattatttcagctacagattttgaagcagtttcatgggatgaagcaatacaatatttatctaaagaatctggattcaatatgttcaatttggaatcttattactttgaagtccataaggggaagcatatagtaactaagtaatagggggcaaaggaatgaataataatactttcatagtcagtcctagtaaatttggtgtaagaagagaatattttatcccaagtttactattggaacaaaaaaagagcttaattgtatttgataataacgtaaataactcatatgagtatacaaataaacaaaaacaggaacaaggatatctagtctttaaatacgatgtatttgatgaagaactatatataaaattgcagcaactactaacagataaaaataatcaaaaatatatattctatattcagcagggagcttttacattaaaccaggaatttagaactaaaaatggaaacgaaaaaatgggagagttatttcgaatgattctagaaggggtaccgccacatgcccatcaacttaagaatttgcactacccccaagtgtcaaaaaacgttattccttcttgatgttgcctaacttttttcaaaatgtcctttacaaagggtacagattacactactcttccttttctttatgaactttcaatttttaagtataaattcccgtctttcccaaaaactaacacaagtaaatgatgtaagttaggggtgagaaaatgttcggtttatcatctaagaaatcaaaaaagactaatacaaaaacactttgttctatcccagaatttatacaaaccatgaaagaatcaagcgattttgtctcttataacatacttaaagatgaaacgttgtgcttgttttattataaatctgtcgtggaagcacttattattaaacaattcattttaactcctataaaaaaggaatcggaacaaatccaaaacatctctgatttatgtaatattatctctattgaagacattattacctccccttctattgatgatattcgtgaaaaattattaggtggatatattttaatacgcttaaaaaacgattcgaatcctgatcaatatgctttaattcgtgccgaaagtactgttttaggaaaacgattatataacgatacagaaaatgagtatagcgtaatcgggcctaaaatcggtttcgttgaaaaccttgatacaaatatccacttattacgccgaaatatcgtaacggagcaactcatttttaaagaagttaccgtcggatctatatcaaaaacaaaagtagcagttgcttatatagaaggaattacaaatgaacaatttgtcaacaccgcaattcaacggctagaagacattgactttgatgtcccatttgattcaactatgattgagcaatttattagtgataatagcaattcaccttttcctgttctattacctacagaacgattagatcgagctgtatttgcattaattaacggggaagttttaattttaacagatggctctccatatgctttatcaggaccaacaacgttactggattttttcatttcaccagaagattattatttaccgtggatgattggatcgttctttcgtattattcgttttttcggagctatattttctcttttttcctccgctatttatacagcggctttaacatatcattatcaaatgatccctgccgatctactaggtcctattattttctcgagagctaacgtaccttttcctcctattctagaagcactctttttagaaattacaatcgaattgcttcgtgaagcaggggcgcgtttaccaacaaaagtcggacaaacgatcgggattgttggggggattgtaattggccaagcatctgttgaagcagctttaacaagtacaattttattaattgcagttgctttatccgcccttgcatctttcacaacaccgactgtaaagatgtcttctactatccggttgttacgctttccgcttattctcttagccggtgcattcggaggattaggcctcgctgtcggatttgtatttattttagctcatttaattaaattaaaatcgcttggatcaccttatttgttacctttatatccatttcgtggtttaggtacagcagaaggttttcttcgattaccatttagtcaaacggcacaaagaccttcttttcttagaccaaaatcaaaatggcgctacaatccaaacaaatcgaagcaaaaacgtgatggtgagaatgaatgaaaaaaattttattgcaccttatcattatcttcttcgttttacaaactggctgtacacaaacgtatatagtggatgcacagcgtattattcatattgctggatttgacatcacaaaaaacaaaaaattccaaggaactattctattcccagagtacacacatggtgtaaagtctaaaccagagacgcaaacaacatctgcccgttcacttgaaacaattgcttcacgattaaatgcgaaatctcctcacaatgttgttgtaggtcaaatgcgtgtcgtcctatttggaaaggctctaggggaacgcggaatgggagagattattactaacttacaacgtgacccaaatatcgggcgtgatgtacaactagcaattgtagatggatcggctgaagagcttttaaattacgggaaaaaaaatgggtctttatatattgctgatttactcgagcaaaatataagaaatgagaacattccacaaactgaattaaacatttttttatataattattactcttctgtatgtgatgcctatgttccttatattaaaatggacgataatcattctgtcgctgtcaaaggacttgcctttttaaaaggcgataaagtcgtcatgtatacggataaaagacattctgttttagcaaaattacttattaatcctacgaaaaatggacgttacgaagcagcaataaaaaaggataaacataaaggtatggttgtgatacaaaacttagctgggaaaaacaaatatgatatagatcaaactggcgacataccaaaagtaaaaatccatttaaaattaaatggattaattaaaaactctcctaattggattgatttaagaaaagaaacaaatatcaactatataaaaaaacaaattgaacgaaatgtcgaaaaagactgtgaagatttaataaaacaatttcaagaaaaggaaattgatccgttaggaatacgagatgaaattagaagccatacgagaaaatggaatataaaacaaattcgaaatatgtataaaaatgtagcggtagatataaatttagatcttaatattgtacaatctggaatcggagaatagtgaggtgaaataagcaatgaatacaatgaataaaacaaagacagtatctccatattttgcatttattttattgcattctctccagattggtataggaattctcggatatcaacgtgtaattttgaaaaatgcaggttatgatgcttggatttctcttattattgcaggtattgcaactcatattgtactgttttgtatgttaaaaatgcttgaaaaagacggagatttaattagtattcatacaacaacctttggaaaatgggttggctctatattttctgtaattttcactctttattgcttattattttgccttactgttcttcgtacatatatggaagtgatacaagtttggattttccctaccattaagttatggaaacttacgcttatgtttttattagtcacttactacattataaaaggtggcttccgttctgtgacagggatatgtttttggggtattgttcttcctatgttcgttgtattctttttagtctatccgatgaagtatgcacattttcgtaatattttacctatttttacacattcaccttttgacatgcttatatctgcaaaacactctgcattggaatttctagggtttgaaacaattcttatcttttatccctttattgaaaaaggaaaatctttaaaaagatgggcccatgctggaattgcttttagcaccttaatttatgtagttttagctatcgtatcttttatgtattacagcgagggacaattaaaccgtactatttggcctactttaacgatgttaaaaataattaaagttccttttattcagcgctttgaatatattattattttcgtttggtttttaattattttaccaaacctttgcttaaccatttggtcatcatgtcaaacgatgaagcgttcctttcatatttcatttaaatttacattaccgttttttattttcatcatattttcagcttctctacttttcacaaaccgtgaaagtatcaacacattaaataccgtactatctcaagcgggtttatatattgtatacgcttatatcccaattttatttctattccattcgctaagatggcgcttcaaaaatcagtcaaaaaaatcttcaaccgatacaccgtaatctctgatacaatttgattaatacatttgtaaaggggacaagcgaatgaaaaagtatgtattttctttacttgcagtactaagcttaattcttgctggatgcggaagtactggtacaaatgaccaaaaatcttctgaatcaaaacaagaagaacatgaccacgcatcgcacactcagcaagctgacattcaagagaaaacaaaaggagtcgacacacttccaaccttcctagataagcttgatccacaaatgaaagatatctacaccgtcgctggacaaaatgcagagctattagattggattccatgctattgtggttgtggtgaaagtgtaggacataaaaataataaaaactgctttattcgtgaaattaaaaagaatggtgaagttgtttgggactcccatgcaacgacttgcgtcaattgcctagaaattgcagttgaatctgcttccatgaaacaaaaaggaaaatcaacgcttgaaattcgtaactatatcgataataaatacaaagaaggctatggcaaaccaacacctacgccaatgccaaaagcttaaaaaacgagggaattcctcgttttttcttttcattctcattttttcttaacaaattctttcaagtgtatttctccttacttatcacacactatatataactctcggtaaggagggtacacagtgcaaacatataacgactatgataaagctctctattacacgtattgctgtaattgggataaattactcgttctcatggttcaaacgaacgatcaattattttctaagcgtattgagcattttttacacgcttatcaatacagcaaggaactgccagaagttgataaacaattgcagctcctatttcaatatattgaccacgcatcccaaaagtcgcatgtagaagaagtagaacaaattcaaatgtaaactatagcgctattctcttccggagaatggcgctttttttaaatttttatatcaataaaagtttctcctcataaaacttttattgataaacatattttttctttcttttccataccacttcatactataatttagtatgtaactattataagagaggtataaaatatgggacgagaaaaaaagcaagaatatgctttacttaccgcatggggagcttcttttatcgctacactgggaagtctttatttttccgaaatcatgaaatttgagccttgtgtactttgttggtatcaacgtatttttatgtatccattcgttttatggctcggtatcgctgtagcaaaaaaagattatcgcatcgcaagttattctttaccaattgcaagtattggtgcttgtatttctttatatcactatgcaattcaaaaagtcccagcgttttcagctgctggagcagcttgcggtcgtgtaccctgcaccggagaatttataaactggtttggttttattacaatcccgtttttagcacttatcggctttattacaatcgctgtttgtagctttattgtcatcaaaaacaaataaggagatgaaagaatgaaaaaaatgcttatatttggtggtattattatcgccttgttcgtagcaattttcgctgtcacacaaatggaagaaaaaaatgctactagccaaaagattgataatcctactgaaagtaagacaaacggtcctgactactacacaaataaaatctctctttcagatcttcaaaagaacttaaaagagaaaaaagaagaaacagtatacttttatcaaacatcttgcgttcattgccaaaaattatctcctgtcctcgtgccaatggctaaagacttaaacgttgatatgaaagttatggatattgaaaaattagatgctccttgggatgaatataaaattcaaggaacaccaacaatcattcattttaaagatggcaaagaagtgagccgtattagcggtgaacagccgaaagataaattaaaagaatggcttgagcaaacgaaaaagtaactagaaaaggaaactccttctacacatgaaatgggtgtaaaatcccacactaatgtataaggagggggttttatgccagaagtaagatgttctgtttccaactgttctttttggggacaaggtaacttttgtcaagcaagtgcgatcatcgttcagcctgatgcagatgaaactggtcaaactgaaaatgattcatatacagctgctgttttaacaaacgagacgctagaaagttctgtagcaacgagtgtagaaacttgttgtcatacatttaagcctaaatattaaacaaaaaaagcatgcgattaatcgtatgctttttacattcccctccaaaaatcatgcataataaaaaagtacaaaataacgagaacggccgtcccgcataaggtaatgcgccgatatatactcttctctccttccctcgctttcacaaacgcccaaataaatccgaagaacaatattaaatcaacatatggaacataaaaagaaaagacgagaaacgcatataaatacacgataaataaacaggtcgttactaaaaaaactttaaacgcaaattcacttttcataatataaccgccccctatctgtactgtattatattcagcaaaatataatagttgcagttaaactccaagtataaataagctaccgtctataaaacggtagccattacggaacattgtatttccgtttatatatattacttaaaatcgaagaaggaatttgctcgtaacgaattttctctcctgtttcatctataatatacgaattgtttcctatataatatattccatcttttcgttttgagtacactggatatctttcatttggcaataccgttttcactttcgttaactgtccatttggttcttgccaatatatatccgcgcggtctactaacgtaagtactccaatttgttcttcttctattttccgactattccagctcacaacgcgataaccaagcttattcgcttcatattcggggctcgtatgaaaacgagaaatgattacttttgtttgtaattgtactctgtcatacaaccattgtatatccctgtcatgcatgcgaatacaaccatttgattccctacttccaatcgtccattcccgatttgtcccgtgaatcgcatattcattcttatctagtccaagccacctcgtaccgagaggattattcggtgcacccccaggtattttttttcgatggtattctttatttttaaatttagttataatacaaaagttaccttcaggcgtaggtgtacgatctcttccagtcgttactggaaatgtttttgtataatttccattctcaaaaaaagacaactgatttgtcgtaagattcactaatattaaatgatctgtattagcaaaagcactaaccggtaggatgaaaaataatagtatgacgaaacataactttttcagctatatcccccctagcgctcactataataagtggaattaacattactttgctcttataaatgaaaactatccatttacaataacgcccccatttacatgtatcatttgtccagtaacataagaagaatcaccagacgctaaatatacgtatgccggcgctaactcatatggttgaccaggcctttgcattgggacattgctcccaaactgagagactttcttctcatcaaagctcgatggaataagcggtgtccaaatcggtcctggtgcaacaccatttacccgaatccctttttgcactaacgattgagaaagtgatcttgtaaaagctacgattgctcctttcgtcgcggaataatcaattaacgtttcatttccttcatatgcaacgatagatgccgtatttataatgacatcccctttcttcaaatgagaaagggctgctttcgcaacgtgaaaataagaaaaaatattaatacgaaaagtcttttctagctgttctgctgtaatatactctagtccttgctgcggatattgctgcgcgacattatttaccaaaacctgtaaactacctagctgctggacggtctcttgaacaacatctttacaatgctgttcatcacttaaatcacccggcaacaatacacactttacaccttctttctcaacatattgcttcgtctcattagcatcttcttcctcatctaaataagcaatcgcaacatttgctccttcttttgcaaaagcgatggaaactgctcgtccaattccgctatctccccctgtaattaatacattctttccttttaacttttcgctacctttataattgggatcttcaaactgtggtagaggattcattaatgattcaataccaggctgcttattttgatgttgcgcaggcattgttataaagtttttttgctgtggcatagctgctttcaactccttttccttagcatgtgcacaataaaaagctgaaattcacacatcggtttacgattaatattcgaatttaagacacaaaatatgaattgttataaactttttatgcaaaactattgcaaaatagataaaaaacgaatattatatataactgttgtgaaaattattcgtaaacagaaaggatgtttatatgtttaacctttcaaaacataaaacttctattaaaactgaaattatggcaggtattattaccttcttaacaatggcatatatcattgtcgtaaaccctgttatccttggagatgcaggtgttccatttgaacaagcatttacagcaacaattattgctgctgttgtcggaacattatttatggcaatctttacaaacttaccaatcgcaatcgcgccaggtatgggattaaatgcttacttctcttactctgttgtaaaagcgcatgaaggcatgactttcgcaattgcattctctgctgtattcgtagcaggtatgattttaattttgctatcatttacatctttccgtacaaaattaatggaagcaattcctgaaaacttaaaacatgcaattactgctggtatcgggttatttatcgcctttatcggtttacgattaactggtatcgttacaaaaaatgatgcaaacttagttggacttggtgatcttcactctgctccagttctactagcattagctggacttggaattactattatccttatgtctttaaatgtaaatggcgcactatttatcggtatgctattaactggtattatcgctttcttcacaggacaattaacattctcaaacggtgttacatcaatgcctggattaccagaaggaattatcgtttcaaatccaattactgctgtatctgacgtaattaactacggattatacggcgttgtattttcattcttccttgttacattatttgatacaacaggtacattacttggggtagctcaacaaggtggatttatgaaagacggaaaactcccaaaagctggacgagctcttctatctgactcattctcagcaactattggttctatgttcggaacgacaccatcaacagcttacattgaatcatctgctggtgttgcagctggtggtcgtactggtttaacaactgttacagtagctgttctattcgcactagcagcattcttcggaccattagtaagtgctgtctctggtgtatcagctattactgctccatcattaattatcgttggtagtcttatgatgggttcagttcgccacatcgattgggacacatttgatgaagcattcccagcatttttagtaatcttaagcatgcctcttacatcaagtatcgcaacaggtatcgcacttggatttatttcatatccacttatgaaagtggcaaaaggtaaattccgtgctgttcacccacttgtatatgtatttggaattttgtttgcttatcaattgatattcttaccacattaaaaaagtagagcatcgaaatccgatgctctacttttcttttacaacaatcattcaaactataaaggcacctccaaaatatgaagaaggttataaccttttaatacttctcttctacctttaattctttactatacttttgaatgaaaactgatgaaataaccattactatgcccacactaaaaccaataagttgatctattaacatttcatcatgaataaaccagcgaagtaaaaatacgctaccaaaaataaacatcataataaacccagtatgcctaagtcctttatagacattttccatatgtatcacctcttcacatagcattatccatattataccatacaaccatcaagtaaccgtatcgtcctctgacaatatgcagctaccttttgatcatgtgtaacaactaacactgtttttccttctttattaatctcttgtaaaatactcataattttctccccattttcttgatcaagagcaccagtcggttcatcagcaagtataatttttgtatcttgtgctaaagcccttgctattgctgttctttgctgttctcctcctgataactcgtaaggatatttgttaatatgcctctcaagccctaccattttcagcatttcttttgatatttgcatacgtttcttatgagaaattcttctatatataagcggaagcattacattttcaacaactgtataatcatctaatagcgaaaagttctgaaacacaaatccaacttccgtgtttctatacttatgataatttgacttgaatgtactcgtatccattccatctaaaaaatactttccagtagaggggctatcaattaagccaataatgttaagcaaggttgatttcccagaaccagatggtcccataatggctatcatttcgcctttttctattgtaagattaatatcttgtaaagcactaaaattactctttccgtatcccttagccacatttgcgagctgaatcatctataacacctctttcatatatgtattttttatttttagtacattgaaataaatgattgcatatataacgaggatcattacaattgataaagcacctataacaaccaatgattctatagagacttttaacgttccaaagaaagatactatactattttctagccctttctgaatttcaattactccgctattctcccattgaaaatacattatgcctatacatatcgctaaaacgaatagcaacatatactcaataataaatggaagacatatttgaaaagtgcttgcacctaacgctgatctaatagaaatatttttacgctccatataaagtgctgccattgatgttaatacaatagatagaaatgaaaaaaataagactgtaccgcttaataataaggggtatgacatattatcaataccttgtttttcgttttctaacaatttattcggatttgtaacataatacgaataacccttaccttctgttacctttaatactttcttttgaagttcatttatatttatcttatcatttgtttctataattaacccattgtataaaagttctacactatagaactctatttcttctgttccaattggtaaaatcgccatgtcatctaataatgtaatacgattatccgatatttcaccacttcgaggatatgtaaatggtgaatttttttctaaaaaaccaattacttttagcttcatttttaaagatggtataacatcaccaatagataccttttctatataattagcccctaatataacaggtctaatatcaaatactgatttatgaaattccgattcctcaaaatatcttccttgtgaaattcgtatacgaaagtacttattaatatctttatcaacaataagagtctttatcgttccattttctttttttaaactaagtgaatagttacggaacagataattagttttatttgttattggtatcatattagataacccttgcatgaaatgttgataatcatttttcgctttttcttcgctaaacaaggttatatcttgcgtcgcataaagttcatagaaatttttatgagtcgataaattatttgctaccgtcatcatttttcgatatcccgaaagattactaacaaattctattgctgaagaaaatgcaataattaaagaaattactataatcaaacttggtaacaaccgttttttcacagaccgtatagaatcaaatataaaaaacatgacgacctcctacgttcttaaatgttttccgggatatatatttataatgtgcttgattggaattacagtaacaaaaattgtaagaaaaattataaaaataacattgcatatcaatacatatagtgttaacggttttactaagtatgtctgaaaataagtatgaattgttcccgaaaatatttctaacgtaataaaaactaagaacatcgctgctagagaaataaacaaaatttgaatatatagttcgcagtagatagatatattagaagcacctactgctttttttaatgaaatctctctttcttttttataaatccaaaataaaaccgcagaaatgccagaaacaattgcaacaagaataaatttataataatacttatttgctggatctatatgtgtcacatgtagttcttgaagatctcgttcattcagcatttgaacatctcccgaaagcacttctttactcctacccataaacttttttatttcgttatgaatagatgatgtaggattaacaactgttaattgtaattgtttactctcgataataccttttttagatatagtaggtaagttttgaagtggaacgtatatgcctgctacacctacgtcactgtcttttcttgatatagttcctatttttttatatgtatcatcaaattcatataactcctctacattcgtttgatcgccaacaaccatatcgtttacattttcacgatgaaaatattgtccttcagaaatatatggcttccaataataatcatcttttaaattcacagctatgatctttgttgcccctgaactatttaatacttttaaatgctctacataaatatcacttttaacaaaagtatcttgtatgaaaggaattatctcttccaattcagttgcattcgctatcggaacagttaaaacttggttcttctctggaaaaccaatttgaaaagcagatataaagtttcgtttagactctgttaaaagtgcggctattgatatagaaagaaaagaaataaaaaatgacataaggagaattaagaaaaacagtttattgctttttatatttttaaaagctaggtacatgtctgtgctccttttaaataagaaggagatgatgaacatccccttctccttatctaaatatttataaagacagcggtttaatgctttttaccactgtaatcataagttaccattactatcaaaagtacctttgtgtgtatcttcttgatagtcattattctcatttgcataatgctccgagtatagtccttttgcaccaaaggcgttatatgcaccattactcacagttgcgtttaatgctcttccagattcatgggatcctaatttgtctgaagcgctttcaatatatgaattatttccatttgatttaataaaagaaattgctactgaacaacgagatgcattttgattcgtagtagtttgagctctgtaagatagtaggttaccgcttttgtgaccgcttagagttggatagaatgcacttgttgaggttgatgttgctaataatactaaagtcgtaattgaaaaaacttttcctttcattaacaatcacctcataaatttaatagtttagtagcgctacatcatcataatatcctttaaataaattctcctcaacaaaaaatcccaatgttttacaaactctttaaacacttaaacattcatacatttttaaaaagtaacgtataagtagcaatataaaaaagctgcggagaaactcttctccgcagcctaatacttatttttgcaagaacgcctttaaatctgcaaactgtctctttgcatcttcatagccttgctcgtataaattttgtagttttgctttatctttttccatacgatctacttgaagcggcacttctgggcgaataacaaataaattaccagcttgctcttctttttcaatatagtgaagtgtttcattatacacttcataacgattgagcatcgtgttaacaagattcggatattttttataagctttcgcagcaacccatccaaaccttgattttttcttcgcgtagccatgatttctcgttaaaataacgactgattttttaaatccatcctcttgcgctttacgaactggaattggatcagaaatcccgccatctaacagttgtttaccgcggtaatttactaccggtgcaatgaaaggcaatgaactagacgcttgtaataaatttagcgcatcatcattcgttccttctttttcaaaataaacagattgccctgtttcacaatccgtcgttcctacaaggaaacgttccgggctattaaagtatgtttcaaaatcaaacggcacatacttttctggaatttcatgaaaaatgaaatccatatcaaatagctgacgttttctccataagtttttatacgataaatatttcggatgtgatgcataatcaatattgaccgttttatttctatttctttgtctggaaagatacgacgctgcatgacaagcaccagctgatacaccgattacatatggaaaatataaatcttgttccataaagtattctaatatcccgcccgtgtacacaccacgcataccgccgccttctaatactaaccccgtattttcaagcatgttactctctcctctatatatattgactctttaattattcaccatgttaagtatctttttctattatatatgagttctttcagaaattatatttaaaagacttgagaaaaaggagttttttcttccaattatatttccaaatgatcggagacatcctttataaacctttgaataaagtcttgctcttctttcgtatatccatctaaaagtaacaaccacttttcttcagcttgcttatgcaatttttcatgagctttatatattttattcccactttccgttaagcggaagaagatttctttttgattatctaacatttgcatcttctcaacgaattgcttttgaaacaactttgtacaaattttagagattgctcccttcgtcatgcccatttctgtcgtaattgccgttacatttatcaaaccattttttccgatacattcgattacatgtaactcagataaagacatactacttacacctgtctcacgaagaaacttctcattttgtcgttttaaatgttcttcttttttatgcaaaagtgtacgaatgtccgaaagtatttccatttgcttcgttgcatgcttcaatccgttcgcctcctaagtttccaaagaaacaatttaactatataccattttaaaaccattttttcatctttacaagtgagaaaatcatgttaaaataaatttagtttcctaggaaactaaataataaggaggttaacatgatgaaaaaatctaaactaacttttattttatatgttgtctgtattagtgccttattcggttccttcgctcaaaatatttacacacctatcttaccgatgattcaaaattcttttcatacttctctttatcttgtaaatgtaacagtttcactttttacattcgttcttgcgattatgcagctcatatatggccctttaattgatacaaaagggagaaaatctgtccttattcctagtttaattattagtacgattgcttcaatcggatgtgctttttcggcaaacatttatttatttctcttttttagagctgttcaagctataggaatagcggctatacctgtagtttcagcaacgattatcggcgatttatttgaaggaaaagaacgcggagaagcgatgagcctataccaaatgttacttgccctcgcacctgcaatggctcctctcataggtggttatcttggcggtataaatggtcacttatctgtatttctctttttatctacacttggcattatcttattaatgataaacatttcactacttccagaaacaaagccaaatgtaattaagcagtctaaagcacaaaagaattactctcttatcttaaaaaataaaactggattttctattactcttattggcttcattcaattttgtatttacttttgctttctcgtttttttaccgagtattttaacaaattcatttcatttaactgtaaataaaattggtcttatgtttgtaccaatgtctctttctatcatgctaggaagtttttgctacaagtttttgcaaaaacgcctcacaacaaagcaagctttatttattacgagtttcttcaatattatatgtgtcgttttattctctttcacatatagcatcaatatcccattcatcattatcgttacatctttgtacggttttagtatgggactttctatgccaactcacactactttattaacagaagaattcgtacaagaacgtgcaacagctatcggtatatacaacttcatccgctatcttggtatgggtacagggccacttataggtggatttcttttatttaaccaaaattacttttggattttcttcctaggcgcaattatgtttttacttgtaatcttatatgcaatgaaaatgctaagttttcatgctgtacaaaaattaaaatagagcccccaaaatgtcggctctattttaccctctttgatccgcaacaatatgaatatcaatatactttgtttgtctcataatttcatttacaatagagccttttcgtatttcttcccaccttgttcttgcagattgtccaagtaaaatttgcgtcacttgtaatcttcttgcgacttcaataataacatccgctggttttctccctttcgcctcttctaatacaaaactcgcatcaaattgattggttaacgatttccactcttcaatcgtctgcttttttccagctgaaatagaatctatattttccctctcaacgtttaatacgtacaattcagcatttaaccgatcagccatgcgccatccccgtcttattaatttctccgctgttgaactgtattgtacacaaacgagaattttttcttttacgccaattggttctattactgtttggctaattttctcgtccatatcatcggcaacttctcgaagtgataattccctaagtgctcctaaattattaagtgtaaagaagttttgtaagctttgctgaattttttcttctttatatatctttccgtctattagtctcttccttaatacctcaggcgttgcatcaacgagctgaatttcatttgctttttgtaaaataaaatctggaattcgttctcttacttttacattcgtaatttgagctacaatatcatgaacactttctaaatgttgaatattaaaagctgataataccgatataccagcctctaacaattcctgcacatccatataacgtttcttatgtttagaaccaggaacattactatgcgcaagttcatccactacgactacttgcggcgcgcgtttttttattccttccacatcaagctcataaaatacctttcctttatactgtatttctttcaaaggaactttttctaaattagcaattgcttcttccgtctcttttcttccatgcgtttcaattaaaccaattacaatatcaattccatcttttttcatttcccttgcatcaaagagcattttataactttttcctacgcctggagctgctcctacatatagctttaactttccgcgattttgctgacgaatatattctaaatattcctctggcgttcgcctttgaaacttcggttcataatcatctgcatacaaaataaacactacctttcattcgaaacaacgctacctcaatcctttagattgaggtagcactgttgctattttattaatttctgtaactctaaatttaattttaagacgttcacacgatcttctccaaacaagccgagtgcagcgccttccgtttgatccttaatcaattgattaagtttttctttcggaatattcgttaatttcgagatgcgatccacctgcaccgaggccgcctttggactaatatcaggatcaagccctgaacctgaatttgtcactaaatctatcggtacttctgtaactggaacagctggatttttttccttccagtccgcaatacttttctctactcgctttgctaaatctggattagatggtgcatagttatttgaaccagatgcttcagccttatattcaatactagaaacacgcccttgaaaataacgtggatccgtgaagttttgaccaattaatttagaaccaatcacttcatttttatcattatatattagacttccatccgcattatccttcatcactgcttgtgcaataccagtaacaataagtgggtatacaagtccacacaacactagaaatgtaaaagtaatacggataattggtgatagtatactttgtttcttctccatctttttcccctcttccttatataaacaagccgacaatcatatcaattaccttaattccaatgaacggaacgataactccgccaagcccataaataagtaagtttcggctaagcaatgcattagaactcatcggtttatatgcaatacctttcatcgctaacggaatgagtaatggaataataacagcgttaaatattaatgctgataaaatcgctgacagtggtgatgttaatttcataatgttcaatgcctccatttgcggaatcgcaagtgtaaacattgctggaatgattgcaaaatatttcgctatatcattcgcaatactaaacgtcgttaaagcacctcgcgtcattaacaattgcttaccgattcctacaacctcaataattttcgttggattcgagtctagatcaatcatgttcgccgcttctttcgctgctgtcgtaccactgttcatcgctaatccaacgtccgcctgtgctaatgctggagcatcatttgtaccatcacctgtcattgctacaagtttccctttatcttgctctgctttaataacagcaattttatcttccggtttacactcggcaacgaattcatctactccagcttcttttgcaatcgttgctgccgttaacggattatcacctgtacacataaccgttttaatccccatttggcgtaactgttcaaaacgctcacgcatacccggttttactgtatcctttaaataaattaaaccataaatacgattatctactgcaactacaagtggtgttccaccctcttttgaaattaagcctgctttttgatttacatctttcggaattattccgccttgtgactcaacccattcaataacggcacctacagcaccttttctcactttcgttccgtcttgtaaatcaacaccactcattctcgtttctgctttaaacggaacaaactcaccttgttctgcaagttctctattgtatgatatagattttccctgcacatactcgataacagatcgaccttctggtgtttcatctaaaacagaactaatagcggcccactttccaacttgctcaatcgtttcatttcctacaggtaataatgtatgagccattcggttcccaaaagtaatcgtacctgttttatctaaaataattgtattaatatcgcccgcagcttctactgctttccctgacatcgctaacacgttaaattttgtcacccggtccatcccagcaataccaatcgctgatagcaaaccaccaattgtcgttggaattaaacaaactaataatgcaactagcacagcagtatcaatttgaaaccctaaataatttgtaaaaatcggcaacgtcacaacgacgatcaagaaaataagagttaagctcgttaatactgtatttaaagcaatctcattcggcgttttttgacgagcagctccttctactaaagaaatcattttgtctataaatgattcaccaggattactcgtaatgacaattgtaatttcatcacttacgaccatcgttccacctgttacggaacaaaaatcaccgcctgcttcttttataacaggagctgattcccctgtaattgcagattcatctacagatgctaatcctttgattacttcgccatcattcggaatcatttctccttgttttacgataacaacgtcaccttttgtaagatcagttgctgaaacttggacaatgtctccattttcttttacaacatttgcaaacacatctttcttcgactgctttaaagaatcggcttgcgctttaccacgaccttctgctaatgcttctgcaaaattcgcaaataaaactgtaaataatagaatgagagaaactgttatattaaaccaacctggtatactactagaactacttggaagaaaagataaaatgaacgtaatgataaatccaatttccacaacgaacataatcggattctttatcatgactttcggattcaatttcgcaatggattgcttcatcgcatgtgttacgatatcacgatccatcgttttcgcttgtctaacttcatcttctacagcatgtatttgtgactcatttaattgtttttcttttactactaccggtctcatcatttaccctccattacttcaatgtaagaaattctgcaattggtccgagtactaacatcgggaagaatgttaatgcaccaacaattacaattgttccgatgaagatgccaccaaataaactattatctgtacggaacgttccgactgtttctggcactaccgttttttctttcaacgaagctgccacagctagcatcgtaattaaactgaagtaacgtcctaaaaacataactaaaccagtcgtaatattccaaaacggtgtattatctcctaatccttcaaatccagatccgttattcgcagctgacgatgtatactcatatacaacttgcgttaaaccgtggaaaccggaatgagaaatagcatccgtccctaaatttgttgaaagagctaatgccgaaaagcctaaaatgagcaatggatgaaataaaatcgtgaccgcgattaatttcatttccttaccttcaatctttttacctaaaaactctggtgtccgtccaaccattaacccagatataaacaccgcgataattgcatacataataatgttcacaaagcctgctccaacgccgccatatactgtatttaacatcatatttacgagtggtactaaaccaccaattggtgttaacgtatcatgcatcgtattaacagcacctgtttccgcagcagtcgttactgtcgcataaagggaagaaaatactgttccgaacctcacttcttttccttctgcacttccttgtacatgctggatacccatttcatttaatactggatttccatgtaattcagatgtcgtaattgtgataaatcctagtaaaaacatcatgaatagtgatacgaaaaggatacgaccttgctttttatttcctaccattcgtccgtacgtaaacggaagtgcagttggtaataacatcataagcatcatttgcaaaatattactcatttgccctggattttcaaaaggatgcgtagagtttgctccgaaaaatccaccaccgttatttccaagttccttaatggacacgaatgatgcaactggtccgcgtaatatactttgctttgcaccttcaatcgtatgtgctgtaacagccccatctaacgtttgcggtacaccaagagcgacaaagattaacgccgtaataaaagcgataggaagaaatactctcgttaacgctctcgtaaaatcaacgaaaaagttaccgagttcttttccagcgagccctcttataaatgccataacgagcgctaatgttgttgctggtgctgcgaacattaaaaatgtaatcccgattaattgtgataaataagataagccattttcaccgctataatgctgtaagtttgtatcagccataaaactaattgctgtattaaaagcgagcgtaggctccattccttcaatatgcgctggatttagcggcaatacaccttgtaatctgaaaatgaaatatacaataacaatcataaatccgttgagtaaaactaatgataatgcgtactgtttccacgtttgattgtattcttttacacccgtaattttaaaaataattttttcaaaaggcccgaatactttatctagctttttgctaccttgaaaagctttttctaaataaatccccgttggctttgctactaaaataaacaagagcattgtaataatgactgcaacccaaatcataatgaatgattccccctaattaaaacttctctggatttaataatgcatacactaaatacactgtaattgctgcgacaataaccgataagacaatcatcatgattgctttccttctttcacaactttatctgaccaacttgcaagacttgccattgatgcaactaataaaataaaaatcccgaccattacaacatctaacatagctatccctcgctttgtttttgttaaaatttaccatttaaatgttaaaaaagaacactgagctctactcagtgttcaaaaaatgaacaacaaaaagtaaacctcctctctaaacgcttacgaggttagctgtcggattcgggcctaaagagtagccctactttcaaaactgaaagattcaccccaagtgacgatgcacaaaattggttcccccgctccatttctggaactcagcgattttaggtttttttggaaattttatgaatgatttatgagagtaaatatactcctctatatttcacttgtaaaggggtaaattactgaaaataataatatttacatccatttaaacgcttacattaaaggttattactattatttcatctattttctttatttctcttctcttttcttaaaaatgaccttttaaatatgaaataaaaagagcgaatgagatgaagtgcatagcttgttgcactcagcattcgctctttttattcaacctttattctcctcgtaaaaatgcacgtaaatttctcccgcgaatataaacttgtgtcaattctgcatgtagctgctcatactcggtaatatccacctctaaatacaaagcatcttttgatggtaatataatatacggccctggaaaaaggggatcgatctgaaccaattcttgaactcgctctaccgatactgcccaacgatttgctatatctccaagtaatagtaccttcatcatttcttcccccgccctattcaaaaaataaaaaagaaatattatcacaatttgtaaacacgacaaacttagctccaattgtttcatagagcctcgctggatatcgtttattccttgtaacaatagtaataggtgcttgaaaagaaaagcgaatgtgttctgtgaaaaaactaacgattgaaagctcatcccctagtaaaatcaccttcttaatacactcacaaatactagtaaagtcctgctccttactgcagctataagtccaatcaaacccacaattcctaacttcagccgctatctcttcatttgctgtaaaaataattaactcatgttgaaatgatactagatctcttaaactatctaccttactttcttctccaacacaaataagtgttagttccatgtacctcatcctccttagtataaaagaaatcaaacatagattgatattctcctatactaatcagatcgatgaagtgatgtatccatcatggcaccgtcctctctcaagacgcttacgaagttagctgtcggattcggactttgagagtagccctactttcaaacttgaaagattcacccctagtgcctacgcacaaattggttcctccgctccatataattggactcagcgtttacaaaaaaatgtattctggctgatatattactcctgtattttgaaaaagtaaacagaaaaaaagccagttataaaactggcttttcacttacctatgcacgcattctattcactttatatgcaaaatgattcgtcggcccatggccactaccaatattcaatggctcttcaattgctatactaataaatcgttttgcttcttgaacagcatcttcaatcgagtatcctttcgcaagtcctgctgtaaccgctgaagcaaatgtacacccacttccatgcgtttgctttgaaggaattcgctcgcttctaaactcaataaatttttctccatcaaagaggaaatcaattacttcattcccttgatattctgcatgtccgcccttcataagcacatatttagcacctaattcatacaatacttttgcagcttccttactatcttcaacattatgaatctccatcccagttaacacttctgcttctgggacattcggtgttataacagttgctactggtaataaatattcttttaatgcttgaactgcttcttgctgtaataatgatgcaccgccttttgcaatcataacgggatctagcacaatattattccagccaaactttttaatttgttctgcaacaatttgaattatttcactactaaataacattcctagcttcactgcatctggtgttaaatccgtaccaattgaattcaactgttctgtaataccttctaacggaacaggatataccccttgaacgccaagcgtgttttgagcagtaatcgccgtaatagccgtcattccgtatacaccaagctcttggaatgtttttaaatctgcctgaattccagcaccgccgccgctatcagaccctgcaattgttaaagctttattcactttcatcccactcatccttttctatccaaaatagcgatgataaatcgtttttgcttcgcttatatctttcgttccatgtacgagcacacggccatctttaaaggcgactaacctcttgtcttcaatagaaaatgatagtaaatatggatttatatttaaatcattcacacgaccttccaacaactctttatattgttcaaaatttatttcatctttatgaggtggtctaatttgaactgtatttcgcccgcataaaactgctgtttttgatgtgttctctttatttaaatacggatataatgcattctctccgcatgaaggacaattatgctggcgaagcttttgcacattcatacatgaatactcattcttccacatatcaaacgatacaagcccatctcgaagtgattcgtaatcttctactaacagtttaagagcttctgttacttgatgagaaacgacaagagatacagcaggtgatataatacccgctgtatcacatgttgccccgccaagcggaatcgactgtaataaacatgataaacatggtgttttactaggaaggattgtgtaagaaagaccgtaactacctacacatgcaccgtaaatccatggaatagaatatttttgtgctatatcatttacaataaagcgtgtttcaaaattatcagtcgcatcaataattacatcaacatttataacaagttcttctagctcttcagctgttacatcttgaacgagagcttctattgttacatcgctattaatctcatctaaacgttttttagccgctatagcttttggaagattattctttacgtcgctctctgcatacaattgttgtctttgtaaattactccaatctacataatcacggtcaacaattgttatcttgccaacacctgctcttacaaacatctctgcatttgcactacctaatgcacctgcaccgataataagcacatgcttttctcttatcttttgctgtccttcttctccaattggagaaaatagttcttggcgagaatatcgattattcaactacgctcattccttctaaaggactacttgcagttgcacaacgcttacgtgcaatacgacctgcttcaaatcctaaacggcctgcttcaatacttaatttcattgcttgtgccattttaataggatcttttgcacctgatacagctgtatttaataacacgccatctgctcctaattccattgcaaatgccgcatcagctgggctaccaataccggcatcaacgataactggtactgtcgcttgttcaataatgaagctcaaatttaatggatttacaataccaagtcctgatccgattggagatgctcctggcataatcgcatgcacgccaagctcttgtaatttacgtgctaatacaacatcatcagatgtatacggaagtacgataaatccttcttccagtaacatttcagatgcctttaacgtttctaccggatcaggtaataacgttctatcatcaccaataacttctacctttatcatgtcacaaagcccagaggcttttgctaattttgcaatacgaacagcctcttcagcgttttttgcccctgctgtatttggtaataacgtatattttttcacatcaagtttctctaataaattaggttgctttgcatcaaagatatccatacgacgtactgcaaacgttaaaatttcagcttcagaaacgtcaattgccttttgctgtacgtcaaaatcagggaatttacctgttcctaataaaagtctagaatgaaatgaaaatggtccaatgtttaacataatcaaccgcctcctacgaaagttacaatctcaatttggtctccatcaaaaacagatgtatctgtatgatcatctttttgtaaaatatctttattacgctctactacaacaattctgttatctaactctaaatgtgtaagtagctcagctactgtttttacactcgctggcacttcaatttggttaccattaatttttaaattcaaacttccatcccctttctaaacgcttctagaaagcaatgaatctagcaaatgattctcttgctttccttctattaaatcagccatatattgaccagaaataggacttaataaaataccgtttcgataatggcccgtgcaagcatataaaccttttatttcttcatgctctcccatataaggagcttcatgattcgattgtggtcgtaatcctgcccacgtgctttcccattctgcttcttttaaagctggcaatattgtataagcacgctctaatatagaagttatactttctggctgcacagttttattgaacgtatgtggcttcattgttgccccaattacgtaacgtccaccgcgctttggagtaatgtaaaatctttcttgaaaaataggtgcttttaaaagtttttttctacttcttaccgcaaccacttctcctttaactggatatgtaccccaatcacggtgaaaataacctagtaacttcgtgctccatgaacctcctgcaataacgactttctcacatgtgacaataccttcacttgtaataactccagtcactttattattttcaatacggatatcaaatacttctgtctgttcatatatatcagcaccggaaattgccgcagaatgtgcgaatgctttcgtaagctctggtgcaataacatgaccgtctttcggataatatactgctcctataatagattcggatagatatggctctttttcccgcacatggtctcccgttagaaaataagaatcttcacctgttttctgctgccaatccataatgtgaagtattctttccttctcatcttcattttgagcaatacgataaattcctttttcttcatatccaatatcaatacccgtcttttcacgtaaaactgctgcaagttgtggaaatatagctcggctttctctagcaagttcaaatagcggatcatacgcatcccattctgcctgaacaccaagtaaaccagcagctgctttggaagcttccgatgcaatactttgcttctccacaatcgctactttatgtcctctttctgctagaaaatgtgcaactgaactgccaattacaccaccaccaataatcgctacatcatacttctcacacatgtttttccgcccactttcttattgattccttataagatttcgctttgctatacgggttactactacttacaattccagacataactgctataccacttacaccgttagtaagaacatccactgtgttttgtggggtaattcctccaattgctgtaatcggtatagataaacaccttgcaatgtctgaaatttcttcaagccctctcgctggcacaccttttttacaatctgtcggaaatacatggccataaacgagtgaatccgctccatttttaaaagctactattgcttcatctagcgaatgcacagaataaccgacatgcaaatacgaaaacttttctttcactgactttacatctgtacttcgatatcctagttgaacacgaggaatatttaataaaattgcaatatcaattcgatcgtttatgacaattttagaagccggaaagccctccattaatagactttccacaccttcatataattccttcgtactcttctcacgctcacgaatatgcaaataatcaatctcactctcaatttgcatcgctacattcactaactcttcgaatggcatatggccatttgagattacgtggagctcatttttcatattcattcgcctactttaaaatattttcgaatagttcatcggctgggacggtttctttcgtcattcctttgtccttcagccacttattttgtttctcccaagattcttttgaatctgataaaaatggctcatctttcgtttccatcttctctaataaaattttcatactttccttttcaacttctggcacaagtgggaagttttctttttcttgatgatttaataaaatattcaatgcttcatctgggtttttcttcatgaaatcatagccttttttcgtaccgcgtaagaaagcttgcaacgcttctttatcttttttcaacgttttatcacctgttacaaacacaagctcatgatagtttggtactccgtaatcagctggattaaagtacgctggttcatggccttcatgacgcataacaggtacttcatggttaatgtatgcccctgttaccgcatctactttcttcgtaattaatgctggtactaaatcaaagccaacatcaactactttcactgtatcaggattaccaccagcttcttttaccatcgtttttaaatacatctcacttaaaggtgttccagagtatcctactgtttttccttctaaatctttcggtgattgaatgcccgctgatttcagtgatacaacatgatttaatggtgaacgtacgacagctccaattgatttcactggaatttgctcattcgctctcgccataacaacatctggctgataatacaagccaactgttaccttccctgctgctgccagcgttaatggatcagtcggattagaagggaatttaatatttacctttacaccttcttctttaaagtatcctttttcaattgctgcatagataaagctatgtaccgcatttggataccaatctaacatgactgttatttctttctcttttttacttttgtctgatgctgaattactcgaacatcctgcaattattgcaattaataatgtaaacacaaagatgcgctttaaaaatttcatgaatacttcctccaactaatgaatttcttttctaatatggaaataattacgacgaagaaaatagctaataatgataacaatacaataggtgcaaatacgccagctccatctaactgcgtcatcattctcttactgaaatatccaagcccagcttgtgcaccgagccattctccaattgctgctccgataacactaagcggaactgcaatttttaaagctgagaaaaaataaggaagagcagacggcaactttaatttaagaaaaatatctctttttgttgctccatatgtaactaagagctcctcccattcttttttcgtactacgcagtccatcatacgtattgaccgcaattgggaaacacgtaattaaaactgtgacaacaaccttactccaaattgtgtatccaaaccataaaacaaatagcggagcaagcgcagtaatcggaatcgtttgtgaagcaactaataatggataaaatgctctctccatccatgtactcgcattcattaacatcgctagcccaacacctaatacgatagagataacaacacctattaaaacgacgtataacgttgcaggtaaatgaactgtaaataatatgtcttttagtttccatatcttcattacaatcgcagaaggtgacggtaaaatgtacatctcatctacaattcttgctcctatttcccacacagctagtaaaatactagaaagtgtaatagcaggaactaattctttcaatcggttcatcacacaagtacctgcctttgtaacatactaagaagctcatctttcagcgctaatacttccggtttatataaatcttttcgtgttctgttatgatcaagcggtacagtccgctcagtcaaagtcgttatcggctgctgttccactactaaaactcggtttgaaagaaataacgcttcttcaacatcatgagtaatgaataaaattgttttttcccactcttgccattgttcaaacaaccattcttgcaaagaggtcttcgttaaagcatccaacgcactaaatggttcatctaacagcaatatttccccgcctgttaataaagttcgaataaaagatacacgttgtctcataccaccagataaatctttcggatattttttctcatacccttgcaaaccaaatttatgtaacagttcctttgcctttacttgtgcttctttcttctgtacaccttggcactctagcggcagggcagcattctcaataattgttctccacggcaaaagcatatctttttgcggcatatatcctacaggatggtgctttgtttctgtcagttctatctgtccagtacttaccttttctagacctgtaataaggcgaaataaagtacttttcccacatccactcggtccgataatactgacaaactctttctcatgtatagaagcatttaattcatggatgattggtttctcatcgtaatgaaaagaaacattatgaaactgtagtatgttcttgctcctcaaatccccacatctccttacgataggacatatcccagaataaatattcaaatcgactggaatataagaaaatctcctctaatctttctagttctgtctcagactttcccactgccatttcatttaataaatctattaaccaaatacacagattaccgtattcttccgaactatatccttgaatccactcaccaaaaaactcatgatctcttgctccaggaatatcatttaaacgctttccaatttcccaatagctccacatacatggaagaagcgctgctattaattccgcaagtgtgccattttgagatacagacatcatgtaatttgtataagctaaatttttagcagatggtttcgcagactctatctcctctatagaaattccaagtctttttgcatattgtttatggattgtcatttcgccatttaatattccatcaatttgttcagcgaactttcccattacttgtggattcgttgcttttacaacaccaatcgcatataactttgcataatctagcagatataaataatcttgaataatataatactggaatttatctttttctaacgtgccatctcccatacctactacaaacggatgattatgactcatctcccaaaccggttgcacagtttctaataatctatcgcaaaatttcatttctctatcccctttcaatatatgtatctaaataaaaaaccacttctatatataagaagtggttacagcaaataaagttatacatttattcgatgttccacttcccttcgctagtattacctagatcaggtgttgtaagggttaaggattattcctctctcagcaaatcaagcacccctagtggtttcaatatgaaattttcaaataaaaaagccccgtttctatacgcaaagaaacggggactcattgttagtgtccgaattgcttccctacgctagcataatctagatcaggtaataaaaaggatcaaaggcttacggcctactctcagctggcaacaccagctctcctagcaaactataaaattatcactgtcagtataacaccctaataagacatcatcaacttttttaattttcttaattattaacagaatatcaaatttatacaatacatacattctattttagaaaataaaaccccaattaattgcataagaaggaatcattatcctcaaaaaatttatttttatattgatttcatattacatttatgtgaatacacccactatattatatctttatactataataaaattacaactatacaactagaggaggtctctattccatgaatatgaaagctactgctttaacagcaactactgtagcgattgcttctttacttccttctatgggtgaaacaaatgtacaaaaagcaaacgctgaacaattatctaatattaaaactgggtatgtcaaagtcgatcaagtagcattacatacagaagataacgtaaaaagcacatcaattgatacaattcgctttaatacaaaagtgaacatccttgaaacaactaatgagtggtataaagtatctgttcataataaagtaggttatgtacaaaaagatgctattttactaaaaaacaaacttcattctaatgatcaatacatcgttaatgctaatgcattaaacgttcgctctgaacctaatttagaatcttccattttagatgtattaccaaatggcaagtttattaccgttcaagaagatcaaggcgaatggtataaaatatcgcataatggccaaacaggttacgtacaaaaagcattcatctctaatggttcacaacccttagtaaaaggaatcaccgttcaaaataatacaaaatatactgttgcaacacctaatctaaatgtacgtagcaacgctagtacaagtagcgctctactcggttcattacaaaacggtacacaagtacaagtagtagaaactgtaggaacttggtataaaattcgttttggcacaggatacggatatgtagcaaaacactatgtagtacaaaatcaaccacaagctaaaactgatcaaccttcatcaattccagctgctttcaaattccctgctcaaggaagaattagctcaacctttgatatacgctgggaacaaatgcattatggtatagatattgccgctccaggaaacgtctctatccaagctgctgctgcaggtaaagttgtgaaatcttattattcagctagctatggcaatgttgttttcattgcgcatcaaatcaatgggaaattatatacaactgtttatgctcatatgaaggatcgcactgtacaagctggtgatcaagtacaaactggacaattaataggtcatatgggaaacacaggtcattcatacgggcagcatcttcattttgaattacataatggagaatggaattttgaaaaaacaaatgcagtaaatccactgccatatttagttaggtaaattgtatgccacgcaatatacctcttataattgaatacgtagcctttttaggtttaatctgttgtttaatcatttacaatacaaacattgtatttttatctattattattgcttttgttgcattagaaattatgatggaatcatttcaagtgcaactaaaacaaaaaattgcccatatttataatgctatttttcttttgagtgctctcataacaaatataattagtaatggcttttatttatctactgtatttccagtattctttatggctgttttattatttgtagctagatatattaatgtcccttataaccaaaaacaaaaacaagaacaagaagcttagaaagaggagacactgtgtaccaatctttcaaagatactccaataaaatacatattgaatttgtataagaaagccaatactttttttgatatacaaggaagttatactgaacaacttctcctatatggaatgttttttcttgtcttaatcactttctctttgttttactaacaaaaaaggatctcacataaactggagatcctttttaatttatattaatttttcatatcgaaaatattgtttatccacaagcatatttttcataaataaagctcagattatattttttctctaagctcattcgttgttcgtcatcgcaccaatagaaaagaatatcatgaatcgttgcgtaacgcttatttttaagaaatagcctaaagaatgatggtaaacaatcatgtaattgtataaatatataattgcgtagtgtttcttctttatattcaatgcccttacaaatatacagtaattcttcacaataatatgcatgctgtggaacttgtatcatttcgaaaaatggcacataagatagtagctttccaataaaatgaccgtatcgatccattactcctatcgtcatatgctccatcatttctttcatcacatataaataatcatctacatgcgttgtctttaatgggtctaaacgatcggaaatttgagataatacagctctttgacatgctaaaactgcctgactaggtccataatatgataggaaatctgtacacttacgatatttccgtaataaatcatgtgtatacaaatcatatacaaaagtattacaatacattgctaaactcatcatatcactatttaattgctcttttgataatgatttcgctctcttgcacatataaaagaatgtaaattccaatacttctttatgagataataaatgtttacaatcggttatacacttctcattaaatttaactctatcccaaatttcaatatccctatctgtcaattcacctatacgatatttaataattaaataatttaaagcaactgattgcgtcaaaagatcccatgtttcatattccaatgaagtatgaacaaactcagctaatccttgcgctatcataaaatcatttgcctcttcataccaaccaatctcttggcataagcgaagaatacgcactaaagttggaatttcatctttatgaaactgcggtaatttctttgctttattcatgccatatacgataaatgccgctaaattttcttctttataaaattctttctctttccatactaatatagttcgttctttcccctcaccttttgggtgacaaggtacaagcaaagaaaataattcagcgaaattatttggttctatatatgtatctgtaaccaaattccaatttggatcgccctgtacagccttcatataattccccttcccttttcatctatgtaggaaatattaatttattatcgcaccactaaaaattaatattgttatattcaaaatctatcataatacttatatctatcagtatatcatcttttctcttattaaaaattaagaataacaaattttaaaaaaatgtcgaaattattaaccgtatccttattatataatgtctcagatacatcacgctaacatattagtttaatccatatatgctagaataatgtatctgaaatttatatataatttagctctttatgagtgaccattaaactctcggttaattaaagtttcaatttactctgtacgctctgagatttcactcaaggcaaatccagcttgatcatctgctgattcccttatagctaaatctcctagtgctaacatgccaataagttgaccactatcaactactggtaatcgtctaatttgatgctgtgccattagctctgtagctttttcaatagaatcatttggagaaactgagataatatttgttgtcattacatttgtaattttattagatccaggatgtttttcagcaatccctcgaacgactaaatcacgatcagtaacaagcccaacaacttgctcattttcaacaacaggaattaatccaactgattcttccttcattttaacagctgcctcatatacattgtctagcggtgtacaatgtacaatatgggtactcattaagtctctaactcgtgtcattatttatttcctcctttttatacataccatagcttttccaaaattcctttatttatttctggaaagtaacgtaataaaaaggattaacaaaataaaaaagagccagcataatgctgactcttttttgtatgacccgtacgggattcgaacccgtgttaccgccgtgaaagggcggtgtcttaaccacttgaccaacgggccatggctccgcaggtaggactcgaacctacgaccgatcggttaacagccgatagctctaccactgagctactgcggaataatatatggtgggcctaaatggactcgaaccatcgacctcacgcttatcaggcgtgcgctctaaccagctgagctataggcccatatactttacaggggcagtaggaatcgaacccacactggaggttttggagacctcagttctacctttaaactatgcccctaaatgatgccggctagaggacttgaacccccaacctactgattacaagtcagttgctctaccaattgagctaagccggcataaaaaaaatggtggctcgggacggaatcgaaccgccgacacgaggattttcagtcctctgctctaccgactgagctaccgagccaacataaatggcggtcccgaccggggtcgaaccggcgatctcctgcgtgacaggcaggcatgttaaccactacaccacgggaccatttggttgcggggacaggatttgaacctgcgaccttcgggttatgagcccgacgagctaccgtgctgctccaccccgcgacaatataaagttttaaaaaatggaggaggtagagggattcgaacccccgcgcgactctcgccgcctgtcggttttcaagaccgatcccttcagccgaacttgggtatacctccatgaaggaaaaaataaatattttattattatatgtctaaaccattagagaaaaaatggaggaggtagagggattcgaacccccgcgcgattctcaccgcctgtcggttttcaagaccgatcccttcagccgaacttgggtatacctccgagacatatattaaataaagtggagcctagcgggatcgaaccgctgacctcctgcgtgcaaggcaggcgctctcccagctgagctaaggccccatgttttttgggaatatcgggaagacaggatttgaacctgcgaccccctggtcccaaaccaggtgctctttttggtaagaaagataattgtttagtcatgtaagaccactcctttttatttttaaattacttttgtcttattgctccacgtcttcgttcatagcaaggtctatgcatccccattaaatcctcaatttcacgagtacttaatttctcttttcgttttttcttctttttcttctttgcttgattcgattgctttttccattcacgtagctgatcctttaacaccttcatttccccatctcccttttcaaaataaaaaggacacctattcctaaaacagctttaattgctgctttaatgaattggtgtcctctagttttctagccggacaatattgatttttaatttactttaaaagacttgcttttgagttttctttccaactctcacctttgtgcaaatgaatattccatgcttgtggtggtgtaaaacctatatcttgcagatcttttatattttgcggttcttcaaaagtgcacggcacacttatttctttagtaaagtcaaaatcataattacctgtttcaccaggagaagtatccgcccaatcaacaccaccctttatttccacgctttctccatcgggtgtttctaaatagaatttcacaccttctacactcattcccattttcccaacctcactttctattcaaaggattattttgtttggttttaacttctacattcccttaataatttataattttgtataacaacgttttgaaatttattgttcatttctatgtgatcttttgctttttttaacatgcgcccatttatccttctattaaactttaaaattatgctcccatttccgtttcctttataacttccaaaagtataagaaaccatatactcaaaatatcttgctctcatttccctctacctccatatttttctcaatatatcctaacaacatatcttccaattccattacacatgaattaaattgttctgggtcatcactattcatagttttcacccatttaattatttctttttttaatatttgttctttactcatttcttcttcctcccttgaataaaactcaatattccgtcaatactgtagacaacccattaagttactttctccttgttcccccttggagaaccagccgaacagttagcttttgctagctgctctttttaatggttcaaaatctctaaagaaaacatcttctgataccggtttgatgtaaccgtcgggaaatttagcccaacagtaccaatcattcggattaacctccattaaatgaacaaccgtgccatttttatgcttgtatggttctggtggatctatgaccatatccattctccttttctacaaaatgaaatttttattaattatttctcaacaattaacacatagaaatcccaatccgtttttagtaatatatagttaatctctatatgcttagctttgttaaaaggacccacccccttaatgtgggtccttctttttaaatattttatactaaaatagcgtttttgttcaaattctttcttcttttaactcatactgcaattgctgattctcttcccgtaataatgtaatttcttcaaccagacgtggcactgaatgaaaaacatttaaaatgttatctaagttttctaaaacgaaatcttcatcatcgtatttatccattaaatcgttgtacatttctattgtgagtctaagatcattcagttcttgcaacttttgtaaatccatccctcattcttcctttcaaataacgattttgtattaaatcacgaactatcactggatccagtagtgctttttgttcgtttttcaaatagagattttgtattatttttgtgcgctcattgctttttcttctttaacacgtttcttattacaccaatagcaaagatttgggcctttatgactcattgatggtctatataaagttttaactggcttgctacatttcggacattcttgtttatcatatttcacgatttcgttcccctctcaaataaagattttgtattacttaatgagtcacatcactaatctcagcagttatccaatccgtatcaacatcttcaattggtggcatttctcccaaacgatcaaatgctatctttttattttttttaagtaattcatctaaattactttgtcttttaaggattcgctttaaaccttcacctgctttttctaaaaacctcattgtatcttccttagtacttgttgccatccaaatcctaaaatcaatcggaatgctcatagcatgtacaccagatgttacttctgaaatattaatagatttacttaatggaatagcacaaaaacgatattttcccactttaatttcatgaccaactgcaggtacccattcatcaaatgctagataaaaacgttgagcttgctcattcacttttatttccattccgtttccctccaaaataagaattttgtttagttttctaatttgctaatccgacaataacgcatggtgtatcaccaaattctttctctttatataattcttctaatgtttgatatactggaaatccgacacaagaaacttcaattttttcatctggatgcattgtttctaacaccacgtcatccatatatccgcatccattatgacaatgcattaaataatatcctgcagcttcatatttgctattggccaggataacttttatatcctgatctccgccaaaagacattttataaaattccatatcttattctcctttttcttgtgccttttcaattaaccaataaattgtatctacttctaacatcactaaagggttactagtaaatgcattttcaacagcttcgtcacatttagccttaattgattctattgaaggttccatattttctccctttctattcaaataactattttgtttagttttctaacaagctaatacgctgcaaatacttaactgagaagtaaccactaaatccttctaaaaacaccacttgcgaaccactatttgctttaaattgatctgttctacaagtccaaacttttccctcataacgcttcgcttctaagcaagtgtgcatcactaccttgtcacctgcttttaattcttccattgcaccgaatactgtttgataagcttctttatattttcgttttataaattctacttgcttcaacgttctaacgtttgcaaagcgacctttcatatagtccaagcaaacatgatctatatcttctggaggaccagggaagtaagtggaagattgcttccctccactcgttgtataagtcatctcaaccccaccatgttcattctttatcatttcaaatgtaggtttcatttccgttccccttttcgatcctttttaataaaaattagttgaaacaactactgtaggttctacactcactggtatcaactttcggtagtatctttccccatcgatctcaattcccgtttttcttgcacccttatataaagaacttaaacgtttaaaatcactttcagaaattagtttccatacaaatatgtcattcattgattcttcaatattcctagtatcataacgctcccattcccaaaactttttagataaccattcatctaaatcagtatgactcgtgaatgcatatgcttcatccccacaatcatcttctctaaagacaaagtaatactccgttaaataatcttggtgtttactttccagtaattctttaaatgctctccaattgcttttaagtccgcctaagtctaacgcttccacctctaattcctcccctttgttttttattcaaataacgcttttgttataaaactaatccatcattatgctttccactttgttcatggtggcttgcatatcttgatacgcacctaatatatctttagtcttataattacgtttacctaaatttatgtgtacttcccatctaatcacactgaatctatcttcgctttttcgttgcttttctaaacgaataaccgcacgtctacgtaccattttcactacgattcctcatttcttaacaaaattcaaatttggtcttactttaatagatctgaatccacacttttccctctgtgttgatttaagatagtctctaatgcaattgctgttccctcattcgcaatccattgaccacgatagtaacctgataaacctaaatctccaacttcatacgctttgtctgattcctttctgttttccatcgctgattgttgcaattgatttatatattccttgattacttccttcattatctccagctccttttctaattccttcagtttctcacaatcgatttctcgaatcgtactgaggcattttttccagttctaattactggtgttgttacagccttttctatatcccattttctagtgattactcttgtcataaacgtgctatagccaattccattgggcttagctcgttctaaccacacttttcccaaaccttttctttttatagctggtttcgtagaggcctcttgatatccccaaccgctatttaatctactgtaaaatgtagctgcgtttatcccattcgcctcagcgattctacgccatttcgtgtgcactccctcaaacttgttatgtcttacgcttcctggcggtgctgttaatgcttcttctaaatcccaatccgcttcataaacacgataatgtaacgttttcctactaattccattagataaagcccttgcatattcttcatcggttaaccatcgatttaaagccgccaccattctccctcctaatcgagtgccaaaaattctgtcctagtacgatttgaatgagttatcctaatcttctgaatacacttgccgtgctcttctaacgctgcattccaagcttccacttcagttttagcatcaaaacaatccattttttgtcgttcttctttatcgtaaaaatgcacttcaaaacttggatttaaaaacttttcactggtgcttatggcgttgtagcaaaaactccctattacatcatcaatcgataattgcttcataatcgcatctccagttatttgattttttccgtatacgtagttgatacgcgatcaaccttcccactttgccacgtaatgatttgttcaccaaatcctgttgctggaggattcagcggagtaacttcaccatttttgaccacgtaaattttattatcattaacatcgatttcaactttcgtaggcttcatacgactgaaatccccctttttcttgttagctaactttttgttgctgattaagttgtaaatcttgcttcattgcctcaaatttaattaagtacgctttccaacgcttatcattttcttcttgttgttgctttgctacttcacagttacaaccttccgttagagttacacctgaataaatttctttacgaataattcctttatcacgacataatacacacatgattattcctccttcttagaaacctaaatttgcaagtctttgatccgctgtggtgaatttcaaaacctttgaatcacctaataagcgactaacggttttagcatcatatttattaaaaagttgttttccagtaaagtttgtagtggtaaaggtactcattccttgtctagcatttgataccgcatataaaagacgttggatgaaatctgaagcttgtctatttgaatctgtcgaaccactttccgccccaagatcatccaacactacaaaatcagcttggccaattaattgaacaaaatattgaagtgtatatttactgctcttatcatcgaaagaatccataatcatccttgttattgcttctaattccacatataaacaacttttcataagatgatagttttcttctccctgactgatatcccagaaatattgatttaattcatgaagcatgctgtatgctaagaaactctttgccgtcccttgatttcctgtaaatacaacttttctaatttctccgttctttaaatcctccaaagtttcttctatagctttcttgtgactaatcgtttcatcacacccggttctgtaatcagataatcttgaaagaggaattttcttatttgtaataacactagccttttccagcatgttaaatttttgcaaacggttaatttttttatagtgagcattagcctgttcttctaaaactttgttgttttgttcaactacgcatctagggcaaacaacttgtcctctgtattcaatcatttgaactggcttaatgattttttgtccacctatttcataagagtgattcatacattgatcagaatggtaattcaccttcaattccagggattctgccagctttttcattggtgttgccatttcgtttcgctccttttttacctttgtttttaaactctatttctgctgcattaacatcagctaaagtacgaatatttttattaacccactgttttaaaatgccctcagcataattccatttcttctgctgtttcaaagcacgttccattgctgcttgtacaagttcttcgcttgtatcatttacccattgcgaaatactttcggctatgaatgaatttaaaataccgaaattattttcgtagaaagagaagatgctactactacttacattctctgtagtactctttgtagtaatctctgtatttgtctttactttgaagttaggagactccttacttgtaagtgaagagggtcttgatttagaagtaaccaccctatttacttctaagtaaccagggtcttcttttatctcttgatacatactagaaattttccttatttctgttggtacaggttccacaaacattacgttattcaaaattttcccatcagcgctaatagtcctaaactcgattttgacaagtagcatatcagttaataaatcacatgctcttttcacttgtaattttgtaaatccaaaagtatcggctaactgttgataatttttttgcaacttgtccgctttaaattttttcttgtaagttactttcccatctatttcatctcgaataactgtaggacgataccaataaacaatttcactcaataccataatcgctacaatgtgaggcttaccattactaaaagtgatgtaattaaaccattcatgatctaccacattacctttgaaatttaacccaccaatttcagttactacgtttgacataaatatttacctccttgtacaaaccgccacatatgcttgtccgcttttgataattctttgaatttcataatgtggataaccaacactgaaatactgttcaatcatttgcattaattcatcgttgctttttgctaagtcccaaaactcattaggtaatagcacttgatattcaattaaatccatgtactatttccctactttccgtggtatactaacatcaagtgtttttctaaagggacccattgccttgggtcttttccttttgttcaacatcactccatgcccatcgttttattggttcgtaagtaatgtaaagcaacaatgcactgcatgcgataaacattgcgaatactactaacgatgttgtatcttccactaaatcacttccccttctgaataaacttagcgtatgattagtcatcaatctcaactattacactttgaatctttgtttttaatgcaacttgttgtgtaagtataatagaagatgctggttcaccatcttctattaaccccttaatcatacgactcgcttcaatttttgattcacactcgtaagcgtttaaaccatatcctctgttatgaagtacaaaatatttagtttctttcattttcttttcctcctactgaacttccgccatatttatttgtgaatttacaaaagtaatttcttcacttaatacaattggtaatgtgtattcttcaacgatttttgatgctaactccaaatgaccacgtttaatcgctttatgacttgttactccaaactctctatacaactgtctatagatgtctttataaacttttgatctcaaaccacggtcttgataagcattagaattcttaccaccaagtaatacaacaccataacgttttactgcattggatatttcatcgcactctactgcgaataatggtgcgttttctcgtaagtctttgacatctgatttgatgtgctggagttcttgcttttgtccttctaacgcatcaaatgttagttttaaaatactcattgggtctgtagggatttgtttctgttctctcatattgaaatatccatctacaaactgatcgtataattcccatgctgtatcatcttcaaggatttttaaaagctttgcgtatcctcgttcggagaggaggtagatgttcttcgattgattaaatgattgttttgtatatccagccaatcgacctaatggctcaaacccattagccctaatatcaataatatctacagtatctttaaaacgatttcggttatcattaatacgacgatttacttctccaatttgttgcccatgaatttcagcaatttcttttactaacattgctttcttactttcaccgaatccaccctcgattccagtgaattgataacccgcaatgttttgtttacctaaaatatgtagttcatttgctaccgttaatttatccatgttattttcctcctatttatgcatttggaattacttttgttgtatttgtatcacgatgtactaaatgcatttcattacttaactttttgaagattaaccaattatcagaatttaaattgtgtgactcaatatggatcttttccttcttggttggctttttaccgtttttcattatattcacctcctctgtatctacaacatcaagattaatttcacttaacccgcttaccgtaattcatgattatttttaggtatttttgttctttcgtgaaaatactctattggaactcgtccggctaccgtgatataacctttttcttttagttcattgttaagctgtttaataatttctcgcgctttcgtctctttcacactaaacaaatccatgacatgttcacatctatagacatccatcaaccacacctcattaagcaacaccattagttacgaaacgcaacattcgaggaaaaaaaattcgtataacctcattcggttctatttttaattcattcacaattttatttacttcttctgtatcaaacacagagtaaccgttaatcttatcattcaaggtagttgtacttatctctaatgcctcagccaatttcctataactagaattttcttctcttatttttccttttaaagcttttaattctggatatttacgtcttttgttcatataatcacccctctctcttctaataaattgcagttattgttacgtttcgtaacacatccctagaatacccttaaaaaaaacaactgtcaatacgtttcgtaacatttttgtcaatttcacctctgttgttgttgcgttttgtaacaaacttgtttatactaatcgaaaaagggggttgttacaaaatggaacaaaagcaacttttaaataaagaaatattccctatcagattgaaagaaatcatgcttgagaataaccaaacaatttatactctttcggaaagaattaatctttctgcagccaccgtatcccgatattgtagtggtaaaatggcaccaaaactaactactatagaagttatagcaaaacaatttggtataaaccctgcttggttaatggggtacgatgtagataaacttatcgaaaaaaaacaaccagatcggaaatactatcaaataactgaaaaagacaaaaaagacattgctaaacaattagaaaaaatgttagatggattgggtgatgacaaaaatggttttgccgctttcgatggcgaaccacttgacgaagccacaaagatggtattaaaagattcacttgaacgttcgatgcttttagcacgagaaatagctaagaaaaaattcactcctaagaaatatagaaattaagggggactttgggttgaaggataacataaaacaacacgcactagatctagtaaaagaacacggcacaaacaatccatttaaaatagctaaagaaagaaacatcgaattaatatttgaagacctgcaacatatctacggatattatctttactgtcggcgcgttcaaattattcatatcaattgcactctagaagaattttaccaactctatgtctgtgctcatgaattaggtcatgctgttagacacactgaagaagataccgcttttcttaataagcagacactcttttccacagataaattagaagtagaagcaaatacttttgctgttgaattattgatgcctgatgatgaagtttatcattatctccgttctggatacaccatagaacaaattgcaagtgtttatggagttcctaaacggttcatgaaatataaaacatttaatttttgaacttatttggaaggagttgagaaaggttgcctatctataaagacaaagaaagaggaacgtactatgtaaaaatcgtttaccgcgactacgaaggaaacaagaagcagaaaaaaaaacgtggtttcaaaaaaaagaacgatgctgtcgcctgggaaaaagaattccataaaaaacataatgaaagtagcgatatgagtttcgctagtctagttgaattatacatggaagatatagttcatcgcattagaccaaatactttcgaaaataaaaaatatattattaattcaagaatactaccattcttttcaaaaatcgccataaatgagatcaaacctatgcatatacgtaaatggcaaaacaccctaatttctcaagggtttagccaaacatatctaaaaacaattaataaccaattaaatgcgatactcaatttcgctgtaaaattttacggattatctgccaatccttcaaaagtagtcggctctataggaaaaaagcaagctgattctatgaatttttggacgttagaggaattcaatttattctacgaacaattagaaaaaaaagaaagtaaagttatattctctatacttttttggacaggaattcgttccggggagttattagggttgcaatggaaagacatagacttattaagcaacacaatttccattacaaaatcacttcaaaaggtgaatggcgaaactgtcataaatcctcccaaaacaccaaaaagcaaaagaattattcatatccctttggcactaagtgcattgattgtaaaatataaaaacaaattatacaaacctaaacataatgattttttatttgattgttctaagtactatgtgttatatgaattaagaagaggaataaaaaaagcaaatataaaaaagatacgtgtgcacgatcttagacattcacacgcatctcttctaatcgaattaggatatagcccattattgatatcggaaagattaggccatgaaaaaatcgagacgacactgcaagtttattcacatctgtatccaaacaagcatgatgctgtcgcaaagaagctaaataacttaatggaacaaaaaagttccatatgagtaccacacttctaaaaatatcgtttaaaaacgtggtacttcaacgttcacagctatttattcatttattcccactcaatagttgctggtggcttactcgttacatcatacacgatacggttaacgtgttttacttcgtttacgatacgtacagagattttctctaatacgtcccaagggatacgtgcccagtcagctgtcataccgtcgatagatgttactgcacggatacctactgtgtaatcgtaagtacgctcgtcacccataacacctacgctacgcataccaggaagtgcagtgaagtattgccagatttcacggtctaagcccgctttaataatttcttcacgtaaaatcgcatcagattcacgaacgatttctaatttctcttctgtaatttcacctaatacacgaataccaagacccggtcctgggaatggttgacgccatacgatttcatcaggaattcctagttcagatcctaatacacgtacttcgtctttaaataacgtgtttaaaggctcaattaatttgaactgcatgtcttctggaagtccaccaacgttgtggtgagatttaattgtttgtgcagttgctgtaccactttcaacgatgtctgtgtaaagtgtaccttgtgctaaaaagtccataccttgtaatttagacgcttcatcatcaaatacgtaaatgaattcgttaccgatgattttacgtttttgttctggatcttctacaccttttaacttgttcatgaagcgttcttttgcatccactttaataacgttcatgtggaagccttcgctaaatgttttcataacgccttctgcttcgcctttacgcagtaagccgtggtcaacgaaaatacaagttaattgatcgccgattgctttatgaattaatactgctacaacagaagagtctacaccgccactaagtgcgcatagtacttttttgtctccaacagtttcacgaattttttctaattctacttcgataaagttctccatgttccatccttcagaacaaccacatacgccgaatacgaagtttttaattaaatcgttaccgtgctcagagtgacgtacttctgggtggaattgtacaccgtataagtttttcgcttcattgctcataccagcaattgggcaagactcacttgttgcgtctactacgaatccttcaggtaaaccagttactaagtcaccatggctcatccatacaacttgctcttctggaaggttcgcatataattttgattcgttctctactttaagaacagcctttccgtactcacggtgatttgcacgctctactttaccaccgaagtgttgcgtcataagctgcataccgtaacaaataccgaagattggtaaacctagttcaaagattttttcatcacaatgtaatgcaccttcaccgtatacgctatttggtccaccagagaaaataatcccttttggattcattgctttaatttcttctgcagtaattgtatgtggatgaagttcactgtatacaccgaactcacgaattcgacgtgctattaactgattgtattgacttccaaaatctaaaacgataattgtatcgtgttgtttcttcaaaataatcaccccaacgttagttctcgtatataaatattttcaccaatttggcgaaaagcattaccaatataataaaaaaagccagtcctccgcctctagtctcataacaaagaaaaggcaggggtctggctttataaagaaagatagtctccgctctttataaatataagacacactgccttcatagtcaggttgtttgcggtaacccggtagagactctcaaaccatatcattgaggatatatgaaggatcgttttatattatcttcctagattctaacaatgaaatatcaatatggtcaagagagaaagcgacaaaattctacagaaattcatttccttttctaaaaaacataaaaaaacatccatttctatatagaaatggatgttttttagggcaaacggaattacatcattccgcccatgcatcagatatataaataagaagaaatacgactttttccaaacctgtaaaccctacgtttttttaaatttagaggataaaaaagaaaataaaaagtaaatgattatatatgtttcgtgaccgaaatgtgaccaaaaaataatatatgagagataccctccaaagattttccttcttcatttctcacgatacatttcgctcctaaaatttcacgagcgaaaattacttactagagacgatagttagtcaataaaaaagggtgggcgcaattttgcgctcatcccttcttcatatcattaacggttattttcttttagaaattttacgattttacttttaaaatcatgtagacaataaaagacttgtcgattgatttcctctagatcatcctttgttaaatattcattttcgtgtacttggtcaaacgtttcaacattaaataaagtattttctctaaagtcatctaaagccttatctaattctttttctaatctttcagttgacatattccattccccctatttaattacataagcatatataactaagtcttgtttattaccttcaaagtcatcaattcgagttattccataatcagtacctctaaaacgcactttcatagttggatcaatatcattacgccatctaattttaaaaatagcctctattttgtatttaattgcagccgctccaaaaaattcatctgctgaagcttgtcgataatatgcccaaatgttttcgccgctgggtaacggttcccattccggaattcgctgtcccatttcatcttctgtccatgttgccgttaaaagagttattttcttatcctttttttgagttgtagccataataattctccctcccctataaggctcttaaaaattcatcatgatgctcaaataaaccaacataagcatctaacatacttgctgttccatctattcgcatcttagcagcttgattttttactggtacaatgttgccgttacgatccgtttccacacctgtattagttaaacaccatttaagaataggtgaattattataattaatctttttcgcttgcaaatcggctcccatctgctgcataggaagacttaaagttttggctccttgaatgcatctaaccattttaaagccatgttgctccatttcttctacccaatacttagccgaataactgtcataataaacccacaaaggtgttattccgtaattgttgagcatttccacaaaccatgctgttatatcaccgtaatttatgctatttccgttacaaagacgtaatagcccttgctctagccatttatcatatggaatcttatccatttgaactcgtttttcaaaactatcacgtggcagccaatacatttgatgaataaaccgttttttggtgtctttatccacaaataaaagagttgcacaagataagtcagtagtaacacttaaatccgctccaccgatagcatagcaatttctaaactgctgtatatcaaatgtttcctcgttgtttatatcatcaaatgtaagccatgcgctctttattgtatccctaacattaaagtcctttgtaagtaagccgcttagatcgctagggttattctttgccttttccacttttctttctaaatcatctagttttttaattgatcccaaagctgggtttgcctttttccatgttgtagggtctgtccattcttcttttgaatctaattcgtaaagaatcggcaaaaagctatcatcttcaaatttaccgtctactacattacaagcatacgaatacatatcatcaaatatattctctctgactgtcccagccgttgtaatcataattaacataggttgttgtcgtgctgattgactttgcttcataacttcgtataaattacgatctaaaattgaatgtaattcatcaataataaccatgctgctattaagtccgtctaatgtattactatttttcgccaacggcataagtttagacatagtaagcggaaaatacagatcactttttcgtttcttaatatgcttggataaattaggactttgttgaatcatgctatgagtttcatcaaacaatatacgagcttgatctcgcttactagctatactgtaaacttccgcaccgccttctccatccgcaataagcatataagccgctattcctgctaacatcgttgtttttccattttttcgtgatacatagaataaactttctcgatatcgtcttaatcctgtatccttatccacaaaaccgaacaaagcagctatataagctttttgaaatagttctaactcaatcggcttacctgcccattctcccttactgtgcttgcaaaaacgctctataaattcaataggtttatttgccttgtcttcatcaaagacatatttgcttggttttgctatatcctcaactaatcgtttatattgcctataaactcgcttagaaaccattacttctccagattcaattgcattccaatacccttgtatataattcacgttatcacctcttaataaagtcaattagttcatcttcttttggttttaaatctgttggcggtaataaatcaactaattgcttatacaaaagactgtaacgctgtacagttgtgttataggcttttaacgctggatgttcccttaaaaattcttgcctaccttgtttaaacattgctgtcggtccttcttcatttacttgagtttttaaagcctctaaagtagtttgcataaatacaagctcgttatataaactctgcgctatcggtaaacgctctttaggaatctgccttaatatcgttttaagttttttcatatcactagaaatcgctgtaactttcttagaagtcctcatataatcaccttcattttttgtttttttccatccctccctttatatagaaagtcatggagaggaaaagaaaggctcctcctcggtcctcgagccatgcctttttcttaaattaatggggggtatgttttatttttgaatcaaattccctttgctatcgaatgctaatccatttgcgcatatctcgctgctatgatgttcttggttatggcacgtttggcataatgcctctaaattgtcccaactcaacgttatattgggattattaatattttgtggtgtaatatagcgtttatgatggcatataacggctatatcaccgcatctttcacataaatagtgcttactttgcatgaatccatctttacatttacgccatgttgcactgttataaaaagattttgcataatccttagccatttttcatattcctacctaatacagtcaatgccgctaatagattgtcgattgttcgctttaatcgttcactatcctgatcttgtgggtcataccacaactgtaagagaaactttgttactgtttgtgctaatggatgtactgatgtatcatctgtccatgttcttcctgttgttatctcgagataagacggaatagattctaataacggaatgatgattacgtcattgtcttcaccatctactcttactgtgtcccttgcttcctcgatactaattaacaatttactcactcctttaaataaaagggataccagcgctatactgataccccttcatacttagtttgcttatgcttgctttttagatagtttaataaatgcttctggtacaagtggtttcgtatctgcaattgccattgctcggtaatcaactaatccactcttaaagcttgattctcttgatgtttcaatcattacaccttgcggcatgttgtaacccatgtactggaagtttcctagaataatagtgtcgtcctcgatattgtcatcaataactacttctttacctagaatgtatccaatgctttcattctttggatccgcaataaagataggtcgtccgtttgcatccacaaggctatatacttcgttgtatagtgtagcgttactcatagcccattttgcccctgctgcatatcctcgcttaagcatagccaatgcttttgtaaagtctgtatacttccctgtattttcaaagctatttgtatcattccatgtaacacctgttaccagccctgtaccttgaccacttccagtaccattcactaaagcatctgcaatagcttccattacacaattagtaagttcatcagtcatatatgcttcaaatgcttggatagacattttcttagctgcagcactgatagaaaatactttaatgatctcatagcctttaaatgatacagttgctgttgaaacattttcactttctactggcgccccttctacatgccattgtgccttactagaaggtgttccgattggtacactaatattagttgggatattaaagttacggcaatgtgagattaatccgcccattgtacgtgctttcttgataacctcatttaacgtagttgtaggcaatacagctgcactattcgttgttgtgttaaatgcatccgctcggtgttccgcttcttgaatttccatcgctcggttaaatgttcttgtttcaatatctgtaagcttttgccctagcattgttttatagaatgcactgcggtattctgcgctgccaaaaatattttctgttggtacttgttgcccctggttaaagttcattccagtaatcggattgaattggctacgttgtgccgttccttcgtttgctggtggtgtttgagtttgactttgttgtgcttgtttttctttttctttactgttattcattgcttgttgcaacccttcgatttcaatattgatagatgtaatatctgcatttggatcagtatcaactgtacccttaatttgtgctgctcttgtttccatttctgctaaagaatgattacgataaaaattaaatgcctctgctactgtagtgaatttcatattcttacactctcctcattaataattgattaatttttatttttaatgcttgtctttctgttgatttcaacatttcccatgaactttcaatagctgcccttgcctccacactcgtttgaggatatgcaggaaatggacaaatactaaactcatagactttttcaattttggttattgttcttgtgttcgtctttgcatcaaattggctgccgccttctggtactttaaaagcaaaggacattcccgataggtcttggcgccttactgccgtataaacgctttttccctcttcggtttctggtaattccgccctcattgttaatcctgccgaatctaacgcaaaggacattgttttaggtgttcttgctaaagggattttactcatatcatggttatacagtaagcgaatatccgataaatcagctttatctaatgcgccccttttaataatctcgatatattccccaaatggtgcttttatggtggtaggctgatcgtacacaatcggtctaccatttagaataaggctgctgtcacctgccggctcggctgctcttagttctgctactctcaattctttcattggttattacccccttgttctttaagttgatattgatcggcttttgctgcattaactacatttaatgtttgtagtcgcttgtcaccgtcctcaactggtggtaggtttaaaatttctaatgcttgatttattgtgaataagcctaacggcattaattccttaatgatgtttgtttttgtttcattactagcaaactgcaacctattcgcttcaaaaataatagaattcccaaaggactgctcacgctctgtgaaaagcttgtccgtcaattctaaagagaattgaattgctaaaggctctaatacactttcataaaacgccgcccagtcttcctctgaataagtgctattcacaatggattcactaatacccaaatactcatagattttctttttcaccgcttcaagctgcttatcatcaatagttgtcggctttgtttctagtgggatatagtcatatttattgtctattgctgcgattccaccattgttgccaatggataagtaatcattggtgaaagcttctttttcttcttttagcttctcaggtgataaaacttgattgtatttcaagatacctctaatagttgcattggattttattgcattgctcaacccttcattttgcgtatgtgccaaatctaacgctggcaaaatagctgtattggtatcacctaatagatcattagaattaaagaaacgtcttactataaatacctctgaaaaatgcaatgtgacttgttgaccattcgcaaataagaaacgacaatacatttcacctgttagatcggtgaggtattccacactttgaggtgacaatggatatatagcaactaaattacctttgtcgtccttttctaagtaagcaaaagcattattgtaaagatagtaatgagtaaccaacttataaataagatcatatgccgtcatataagggttcggtcttacttgtaaaatccgatttaaattataatcaccctttttccgacggtctgatgatgtcattacatgcgttccttttagctttgcagcatttctagctatgctatccacagccgccctataaatatcactttcataagcgttaccgctaaaaggtgtaaatattgctggtccaccgctcataacatctgctctttctgtcttctgcagttcttttttacggttaaaaattttattgaaaaaactcgccatttactcaccacctctcatctagccatattttctttctacctgtctctatttcgtattcttgtataagcttcataaggtctaaacgatctaccattaccttttcatcatcacgatgaatttctaattgttccttcaatcgttctaatatttcattcatgaggtttcccccatcctcacaacctctttacccgataatttcatctttttaaggatatagcctgtacgaatataaggactatcttcctcaaaacaatgtgcatctctatgtccttcacctattccatgatgatgaaactttccacagtattgacaccatgtactaagatttccttttttatcacgttcaattgctagtacggttggaatttttttaattgccatttctaccatccttattcatttgattagtaccaagagttctagacagttccagcgcatttcttatttagtacttccgcaaaaacattgtcatatcaacatattctccacttcagttcttaaagttccaaaagtaccacgttttttcaaagtacatatatatgggttttatagaaaaaagttatgaatagttttttctataaaatatatatttattttcttagtactcttggtacttttagtactattcgtattgaatacttgctatatcaatgtttttaggagtaccaaatctataaaatgaactttattttcttagtactcttggtaccccttagttattaggtggattttcttcaaaatcaaaacctaattgttggacaatctctttatttatagttacagcattgatttttcgccctttatggctaattttttgataatcaactgctttcccatctaaaacattaggaacagtaaatccccttttcaaccactcttttctagtccttttttcttctggtcctaagaactcttttaaaaaagatggtgttaaacaaattgaactaaacttataaattgctttgatatttttgggagcatagtcataataaataccatccctattactatccaagtaagttaaaatttcattcaatagttcttttggtttatctattgctttattttcttgggcaatttcgtcaaaaagcttgtccagttgctcaagatctacactaaccttgaaaaattcttttaggagtctacctgcataatggactgttgcataataaagggataatcttgttaaaacctcatttccctgtgctttattcatataaaaatctttaaatttataaaaagatgggagcaactccttcttacgtacttggtactgttttaaaaactctaaaccaattactccataatttgtttctagccccttatataaatcagcgaagaatatataatctactccttcaaatgggctatcatttaaactcacaattcgagcagcagctcccccagctttagatgcatattcatttagacttacttctccagtagttaacatgatatttttccatgtattttctctttgcgaaccactaagagaacccctacctttagacttccctccactgaagttataaacaatggattgaagtaatctttcatccgctttacggctatcatccattaacaaaggaaaactgtttaagaaggatgctttacgttcaatactaactttggttgcgttaaattcatttacaagttcacttgtcccccacacgctggctgcaacttttaatacgcttgtttttccttttgaagttccgctagaaagatccacaatgaaaggatctatttttaaatcatgaagcagtacactagcaaaggatgctaatacaaaaaataatgctctcggatgggctttaatacgattaaatacttcatctatccacccttggactgtcccagctacttggaatgattcaaaaagttgctgctctccttgatcattaggcagtatttcataatctgttgctagtaatggatgggccaaaccacttttcacataacctaaacggtctaccatcagccctctatcaatctcggtaaacgctaaaaccttatcaaagtaatctattaactgctttatgttattatcatttgaaggaaaccctttatctgctaatggcatcatctccctcttagtgaccaatgctccagctggaacaatctcggtgacgaccttccctctatcattccaggttaactcataatataattgttgacgttcaacgttatgtagttctctttttagaatcggaacatgcctagcaaccatgatttcccgttcatcaagttctccattcttgaccttagtttccactctatataaagcattatttttaactttgtaaggagatggaatatttacaggaatgatagaatcctcttgttttttctcattatcgtttgttattccctcatccgcttttccttcattgaccttcttataggccgaattaacaacctttgtaatatccttaataagaaacccttttttgaaggaaacaaagtatttgtgagccaatttaagactggacaatacttcctttttgctcaccttacaaattaataaccttctggctaaatcataaaaatccccatcacgtgaaccgttagtttcatatggataactcataggtgaaggtgttttcgcaccattccatgctttatataagaactgtggaagctcgtccaatttttctagactttgagttacaacatgacgcccttctgtattttcggtcgggaatacgatataacccttttccactgctcgtgtatcttgtgttaaccctaaacgattaacgtaattctgatactgaccttcttttttcgttaaatccgtttcgcctttgaatataaactgccagccattaggagttttaattaaatggtgatgaatgttttctccttcaagtaattctcttagtaactgaccttctttagaatcgtcaatgtcgacaatgaaaataccttttggaacaacacaccctatccagccaccttgaccaagccatccattaatttgatcgttatctaatgaatgcgtgactttccaagaacctactggtgtttttgctttttgatactcttgattgccctttgcatatccagtaagcttaataattttcgctccaggcattatgttgttaattgcttctgtataattcgctgctgtagataacaacttctcacctcccttgtcacaagacgaactcaatgttaaaatataagtagataaataattgttcttgaggatatatgaattcgcagttcatatatctttttttattgtcttttttcaccattctttactacctctttaaataatccatctttaatttcatctactctttcatattctttatttaattcattcatcgtatgattgagcaggcgccaatacactcttagctttctatgaaacccacgaaaacaataaatttcctcacctttgtataccgctgtatccatatcctctactaagtgcgctaaaagaacttctacatctgttaaagtcgcaacgcttactcccagcgatcctaattcaccatcaagttcacttgtgaaattttttaaatttggttgttcattgactgctactaattgatccatatttctaacgctccttatttactattgttaatttcgtataatcttttcttagcttcaaactccatagcttctaaaatctcaggattttttcttgctacagcacatcgttttacaatttcatgcgccttcattaacctcgttgcagacaatactccgttcatatgtattcacctcatttttttaatttgacgttgcaaccgtctttttttcagctatcatttccaacattgcatttatgttcggtccgcaatagaccatctgaccaacaaaatattagtagctttttatattttcatagtttcctatttatccttacgcatccagtcaaggatatcccaacgattcaaacgaataacttgtccccttttaaaataaggtatttcatttgtagctattaatgatcgtacggttggaatacttactttcatatattcagctgcttccttaattgtaaaaatatcatcttgcattttttcttcctgcagttcctcttttaactcacgtaataaacttttcaaatcagaacgagaagttatcaacgtatcatctggtaactcaaattttaaattcactactcaccctcctttttaataagttctttaaagtaaaacattcaatatgatagatatacataacttttgatgatttttactactatttgttgtattttcttgttgtaagacaataatatacctcattgagttgttgtgtcaacggtttttatttatttttacttcatttagttgtaatgtttattatttttccatataatacaagcaaggagggtaaacaacatgcaagaaaacataggtaaggtaattaaagaaattcgaaaggcgaaaggaatttcagcatttgtattaggagaaatgataggagtatctcaacaagcaatttcccaatatgaaaacggcaaaagaaaaatttcctttgaagtactgaataatatagctaaggcacttaatgttcctatggatacttttttatttgtaaatcatgaagcaatagaacagaaaattgctgaaagaggtgtagaggctttagaaaaggagccaagtttatttaacgataaaaccgctaaaggactactaaaactttcagatgacctaaacttctttgaaagcttcttagaaagtctgggttatcataaggagactcttaatactaacggagaatatcacctaaatttaagtccaactagtacaaatcaaataaccgacactgaaacaaatgaacatgttattttaagcggccgtgaatatctcgaattttatgaaagaatatctagggttattgattttgaattcaatgaactaaaaagaaaaaaagattctactaatgctataaatcagttatttggacaagatgaactattataggtggactgcctgcctataatagttaatttattatattgaggtgataaaatggcttcattccaaaagtatgaaacaaaacaaggctataaatggttgttaatcgctgaaattggtattgatccagcaacagggaaaaggaagcagaaaaaagtaaggggttttaaaacaaaaaaagaagcccaattagctgcagcaagcatagagcaagaagtagctaatggaacttacatcaatgaacctgacatattatttaaagattttgtgcaagagtggcttaacatttacagcaaaagcaccaaaataagtagcctacgtgttagacaaaagcagtcggataaattagtcgactttttcgcaaacatcaaaatgaaagatatcacaaaaaagatgtatcaaacagctttaaatgatttacatgataaaggatatgcgtttaatacacttgatggcatccatacagcaggtagaatgatttttaaaaaggctatagagttacaaataataaaattcaaccctacagataacgtaaaactccctagaaaggtggagacagtagaagatatagaaaacgataagaaggctataaaatacctggagaaagaagaattagcgcatttcttacaggtcgcaaaggaaaaaggattagataacgattatgtatttttttctgttttagcatacagtggattgcgtgccggggaattattagctttaaagtggactgatgtagactttgaaaacaatactatcaaaataactaagacgttatataatccagataacaatagccaacgctatcatttacttacaccaaagactaaaggttctatcagaaccattaaaatggatcatggtatcatgaaattgctaaaaagccataaagcaaaacaaaatgagttaaagctatacacacgtcctaaatacgtagatcaaggctttattattacaaaagcaagcggctatcccgaagtaattaaaatggttcagaatagattaaagcgccttataaagttatccaatataacaaaaaatattactcctcattcattcaggcatacacatacatcgttacttattgaggctggtgtaggtattaaagaaatccaacaacgtttagggcatacagacatcgaaactactatgaacatatatgcacacatgacaaaaaatatggaagaaaaagcctctcaaaagttcagcgaactaatgaaaggcttcgtaatttaaatattagtgaccaaagcgtgaccgaaacgtaactattgaggctcaaaagctttatatatcaagctttaaccttaatggttacatcattccgcccataccacccatgcccatgccgcccatgtcaggcattgctggtgcatttggttctggtttgtcagctactacagcttcagttgttaagaacatagctgcaacagatgctgcgttttgaagtgcagaacgagttactttagctggatctacgataccagactcaagcatgttaacccattcgccagtagctgcgttgaaaccaacgcctactttttcgccttttagacgctctacaactacagatccttctagaccagcgttgattgcgatttgacgaactggctcttctagtgcgcgaagtacgatgttgatacctgttgcttcgtcgccttcagctacgatagaagctacttttgtgtatacgttcataagtgaagtaccaccacctgcaacgataccttcttctactgctgcacgagttgagttaagtgcatcttcaatacgaagtttgcgttctttcaactcagtttcagttgctgcacctactttaattaccgctacgccacctgcaagttttgcaagacgctcttgtaatttttcacgatcgaattcagaagttgtttcttctaattgcgcacggatttgaccgatgcgagcttcgatttgttctgtgcttcctacaccttcaactacagttgtgttttcttttgtaacaacaactttaccagcgcgtcctaaagattcaactgtagcagattttaagtcacgacctaattcttcagtgattacttcgccacctgttaagatcgcgatatcttctagcattgctttacgacggtcaccaaatccaggagctttaacagctactacattgaatgtaccacgaagtttgttcactactaatgtagctaacgcttcgccttctacatcttcagcaatgataagaagtggtttaccttgttgtaccacttgctctaatactggtaagatttcttgaatgttagaaatctttttgtcagtgattaagatgtatgggttatcaagaactgcttccattttgtcagaatcagtaatcatgtaaggagatgcatatccacgatcaaattgcataccttctactacgtctaattctgttgtgaagcctttagattcttctaaagtaataacgccgtcgttaccaacgcgctccattgcttcagcgattaattgacctacttcttcgtcagcagcagaaatagcagctacttgtgcgatagaagatttaccttcgattggtttagaaatcgtttttaattcttcaattgcagcagtaacagctttttcgatacctttacgaagacccattgggttcgcaccagctgttacgtttttaagaccttcacgaatcatagcttgcgctaatacagttgcagttgttgttccgtcaccagctacgtcatttgttttgctagcaacttctgctactagtttcgcacccatgttttcgaatgcatcttctaattcgatttcttttgcgattgttacaccgtcatttgtaataagtggtgaaccgaattttttctcaagaacaacgttacgaccttttggtccaagcgttacttttactgcatttgcaagagtgtcgacaccgcgaagcatcgaacgacgtgcttcttcactaaatttaatatcttttgccataataattgacccccttggattttttaagatttatataattaaccgataactgctaaaatgtcactttcacgtaaaatcaagtagtctgtaccttcatatttcacttcagtacctgcatattttgagaagatgataagatcacctgctgctacctctaaagcaacacgctcaccattctcaagcactcgaccagtacctactgcaacaactttaccctcttgtggtttttcttttgcagtatctggtaatacgataccacttgctgttttttcttctgcttgaacaagctcaattacaacgcgatcacctaatggctttagcatgaacaataacctcctcattttgttatgtaaatttcttttattagcactcaagtcatccgagtgctaacacacttataataataaataatctcaatttcttttgcaagtaaaaaaatcataattttttcgcaaatcactatataaactttctatatagaatactgcctttactatatgaatcgttgtttccactgctcgtatgttacaatatgaaaggacaccctaagttgttttcgctacacacacaactttctcctgtcttctattataatttcaaataaggatttacgaaaaaaacataattcaagtgaggtttatatcgtaggtagcatatttacatgttatcctaacttatctcatacactatagttagaaaggatggttaaaccatttgaagaaacaatactggtggattatcgttacatacattttaatgcagttatctggcgttgttggattgccacttctcctaaaaacaggactctatgataatagaggatttaccattgaggaaaaaggacaaatcataacgggacactgggcaattattagcttctttgttgcattatgtatcgtactttggttacttagaacagatattcgtgacaggcatttagatccaaagcgctcttctgctccagctactattggatggattttcatcgggttcttcttagctttcttttcacaaatagttgccggtatgatcgagatgcagctgctaggaattaaacaaggttcagaaaatacaatgaaactaatggagattgcaagaacgaccccttggttccttattgttgtatctataattggacctatcttagaagaaatcgtatttagaaaaattttatttggtgcactttataagaagtttaacttctttatcgcagctatcattagttcgcttgtattcgcagcaattcattttgattttactcatttattggtatacactgctatggggctcgtattcgccttcttatatgtgaagacgaaacggattatcgttccgattgcagctcatgttgcgatgaatacattggtcgctattgggcaaatttttatgagcaatgaacaaattcaagaaatgattaaagaagctgaaaaaatgcaaggctttatcggaggattttttgtatgagaaactcaccattgttcatggctgcactatacttccttcttggatgtatctttacacgcttcgccattacgaacgtgacagatacaatctggaatatgtggacaatactatttgcagttatggcaacaattgattttaatttggcacttcgccttatattaattaaattcacaaagaagaaacaataataaaacgcagaggtcgcttcctctgcgttttattgtggatagtttttcaaaaagtaaactaatgtttgtaactctacagctaagtcaatatgatgaattctaatattctctgatacgtttaatcgcgctggtgtgaaattcaaaataccatgcacgctcgtttcagctaatctatctgctacagcttgtgctactgtagccggtactgttaatattgccacttgtatatcatttgataatctctcttctaattcatctaaatgatatacaggaatgcccccgatttctgttccaactttctcttcactaacatcaaatgccatttcaatttttgtattattgtttttcgtgaaattataatgtaagaaagcggtccctaaattacctactccaataagtgctacacgtgttatatcatcttgatcaagtgtttcgcggaaaaatgataatagataatttacgttatatccatatccctttttccctaacgctccaaaatacgaaaaatctcttcgtattgttgcggaatctacttttactgcctcactcaattcggccgatgaaacacgctgcttaccagaaagagataagttttggataaatcgatagtatagaggcaatcttttagcagtggcttgtggaatcttttgctgatccatatgacctctcctctcttcctatctttattcatatactttaatcaaatacagaagtttagcactcattaaattccttgtataataaagagaagaagtattctctctttattttaaactatacactatttttagtatgattgagaaatataaacatggcaaagttaagaaattatttgaggtgaaaacattgattttattacaagtaaacgcgctttcgaaattatacggtgcagaaacgattcttgcaaacataaaattggaagtacaaacaaaagatcgtatcgcattagttggaaggaatggagcaggcaaatctacattattaaaaattatcgctggtgaattatctcatgatggtggcgaaattataaaaccgaaagatgtctcaatcggatatttagctcaaaatactggactagaaacgtctttaacaatttgggatgaaatgctaaccgtctttacccacttacagcaaatggagacaaaacttcgaaggcttgagcaagaaatgggaaaagaagaaaacttttcaaacgaagctacatatgaaagattgttagctgattatgaccaattgcaactcaattataaagatcaaggtggatatcaatatgaagcggatattcgctccattttaagcggccttggcttcccagttgaaacgcaccagacgacgatctctactttaagcggcgggcaaaaaacaagattagctctcgggaaattattattaacaaaaccagacttacttattttggatgagcctacaaaccatttagacatcgaaacattaacgtggcttgagcaatatttacaaggttatcctggcgcaatattaatcgtttcacatgaccgttatttcttagacaaactcgttacacaagtatatgaaatttcgaataaagaaagcagacgatttgttggtaactacagtaaatatttagacttaaaatcagcattatatgagcaagaaatgaaacgttacgaaaaacaacaagatgaaatcgcaaaacttgaggacttcgttcaaaagaatatagctcgcgcttctacaacgaaacgtgctcaaagtcgtcgtaaacaactagacagaatggaattattaacgagaccattaggggattctaagtcagcatcattccacttcgatattgaaaagcaaagtggaaatgatgttttacaagtaaatgatgcaaccatcggctatgatgagaaccctataattgaacatgtaactatgcgcttaactcgcggagatagtgttgctttagttggtccaaacggaattgggaaatccacattgttaaagtctattgtgaataagttaccactattaaatggtgatgtttctttcggatcaaatgtatctgttggttattatgatcaagaacaagcaaacttaacatcttctaaacgggttttaaatgaactatgggatgaatatccactgcaacctgaaaaagaaatccgtactatactcgggaattttttattcacaggagatgatgtactgaaaccagtatcttcccttagtggtggacaaaaagctcgattagctcttgcaaaacttatgatgcaaaaatcaaatttattaattctagatgaacctacgaaccaccttgatttaaacagtaaagaaattttggagaatgctttaattgattatccagggactcttctattcgtctcacatgaccgctactttattaaccgtgtaacaacgactgtggttgagttatcaacagaaggtgcacaggaatatttaggggattacgattactacgttgaaaagaaaaatgaaatgattgaacgtgcagaacttgaacagcaagaaagtgacattcctgttcaaaaggtggttgcacaagagaaattaaattatttagaagaaaaagagcgtaaaaaactagagcgtcaacgcactagaaaaattgaagagctagaacaaagtatattagaattagaagaagaaattgctacgttagaagatcaactttgcttaccagaaatatatgcagattatgaaaaagctagtgaaattacaactaaaaagcaaacgctacaagaacaacttgaaacttgtatggcagaatgggaagagctgcatgtataagcatatttaaataagaaagatgtctcataagtcaggatttttgactatgcgacatctttttttcttttaatacagaaacaattttttgagtatatcaatcgtaacttagaatataccaacgatttttcaaatatatctattgtaaccctatatatattaacagttcgacacgaaatatcgatttaacgacaaagattgacaatattagcatcttctataatagggggatgtttcaaaatgtttttcggggatatcttcttactttttatttcccgaaaaagaacaaacacaaaggtctgacatcatcctatttatccacaagtttatacacatatccacctttataaaataaaccttaaaataacttttccacattatccacaattaataaaaaagttatcaacattttatatacacaataaaacccacattatcaacagacaatatgggttttatccacaacctgtggttaattatgtgtataactatgcttcaatatctaatcctggatttgcatttaaggctaatgttgcacgcttaccttgttcataagcaattgtccctgccgctgcaatcatcgctgcattatctgtgcataaagatagcggcggaataattaattcaatgttttctttttgtgcaaattcctcttctaatcgcgcacgaagtcctttattagcagctactccaccagcaagaagtaattgctttacattataagcttctgctgcacgagctgctttcgttacaagtacatctattacactttcttggaaacttgccgctaaatcttctggcgcaatttctataccgcgttgttttgcgttatgcacagtgttgataactgctgatttcaatccactaaagctaaaatcatatgaatccggttctagccatgcacgaggcaaatcaattgtcggttctccttcatgtgcaaggcgatcaatatgaggaccacctggatatggcatagataacgtacgagctactttatcatatgcttctccagctgcatcgtctcgtgtttcaccaattacttcgaatgaaccatgttctttcatataaacaagttccgtatgcccaccagatacaacaagtgataataacgggaattgaacttcttttactaaacggttcgcataaatatgaccagcaatatgatgaacaccgactaacggaatatcatgtgcaaacgctactgccttcgctgcatttactccaattagaagtgctcctactaaaccaggaccttctgttacagcaattgcatcaatatcatcaaatgtgatgtttgcttcctttaaagcttcttctaacacaactgtaatttcttctacatgatgacgggatgcaatctctggtacaacgccgccaaaacgtttatgactttcaatttgtgatgcaacgacattcgcaataatttccgttccatttttaacaactgctactgctgtttcatcacaacttgtttcaataccaagtataatcgtatttttttccattatatattcacccacattacgagaccatcttcctgattgtctgcatagtatcgtttacgaatcccaccattttgaaatccgtattttctgtataactgctttgctacttcatttgatacacgtacttcaagtgtcattgtttttacccctagttctttcgcttcagaaataactgctttcaatagggcatctcctaacttttgacctcggtattctggcaaaatagctatatttgttatatgtgattcatcaataattatccacaatccacaatacccgactacacgaccatctttttctaacacaatataatgtgcatgttcattcatcgttaattcacggtgaaaggcatctgcagtccaaggagttgaaaaagacgcttcttcaatagctacaatttgagcaatatcatcaagctccatctttctaaatatcatatccatcttctgcaagctcctacttgttttgactttctaaccactttgtttcagcttcagctaaacgaagatagcttggaacaaacgtatgcacatcttgttcttctttttgtaatcctaagaatgctagctcacttggtcttgggttatttttagtaaatggagcgaatacagcttgatcacctaaatgttctataattgtttctttatgcaatttaacatcgttaccgataaataaaacaggctgtcctttatcttttaacatttgcaaccagtccacaataagaataattcggtcttcttctattgaagttaactgctctccttcatatgtatataacccagtataaatttgcccacgtcttccatcaaataaaggacaaattaacccgctaaagttagcaccgtttgcagctactacctctaaacttgatacacctacaattggtatttgaagtgaccaagctaatgttttcgccgctgtcacgcctatgcgaacacctgtataggatccaggtccagcagctacaacgattttagttaattccttcggttttacgccacactcttttaacagtttctctacagctggcataagacgtacagaatggttttttgttaaatttgtaatgatttccccaattacgtttccttcctcaataagggatacacccattacgtaatttgaagtatcaattgctagtactttcatcttgtaatagctcctcacataatctaatatagcgatctccaattggctcgagtataatttttcttgtgtcatctccagcatggaataaactaatttgtaacttttcatttggtaaatatgcctctattaaatgagcccattctactaccgtaattcctttaccgtagaaatattcatcaaagcctaagtcctcttcactttctgctaagcgatacacgtccatatgatatagcggtaatcttcctttatattctttaatgatattaaaggtaggactatttacaactcttttcactccaagaccttttgctagtccctttgtaaaagtcgtcttaccagctccaagatctccttctaaaataattacgtcttgtgcctctacgagcttacctagtttttctgataacctttgtgtttcctcagaagattttgttgttacttcatatttactcacagacttcacctactttactcacaatgttctctgctctttattatacaggttttgaatatataaaaaagtccttaggagttgtcctaaggatagtttgactgtctttattagttttttgttaaaacaaataaaaaaatacgaaacaacttgtttcgttcttttctttatatgaaatggcggtcccgaccggggtcgaaccggcgatctcctgcgtgacaggcaggcatgttaaccactacaccacgggaccatttggttgcggggacaggatttgaacctgcgaccttcgggttatgagcccgacgagctaccgtgctgctccaccccgcgacaatataaatagcttggcgacgtcctactctcacagggacaaggtcccaactaccatcggcgctagagagcttaacttccgtgttcggtatgggaacgggtgtgacctctctgccatcatcaccaaactatgaaggcatattccttcaaaactagataacattgctacatattatatggttaagtcctcgatctattagtattcgtcagctccacatgtcaccttcttgatgttgcctaacttttttcaaaatgtcctttacaaagggtacagattagttagatgctttctttttttggtatttttggctatctgttagttacttgtttcataagtggtcttatttctttaactggtggtttcttatcataggcatcaacgtaagaaaagtagtagtttaagtttcttagaagaccttttcctatttttgcacttaagaaaggaaagacttgtccggtataatcatcgagagatttacagtaatatttttcatctaaatatatactgtatttacatgttagttctactaaaggattcccttcatcatcaaatacttctttagaatcaataatatctattagtgcaaatttttcatttaagtaaactttcttttttttctcgtgtttatttgtaagtataaaaacgagaccaatcgcgttaatcaaactatttcctcctataaaaaacggatattaataaaatatatcgatataagctaaatgtaaagaggagaggtgaaatatcatggagagaaaactaaataagccgattggtgagagctgataatcagtgggggatgaacaaccccctcactgattaaagtttcactttattgaaatacttgcgggaattgttttacgattgcgtttgttatcatgtcagccatttctaatgcttctttttcaattttatcgtaaagttttactcctgcttcataatctttatttaggaaggcaagtgcttctgctttcgttagtgctgaatgttcataaaacatttttctaaattcttctttatctatatatgggttgatcctgttaaggaattcaataattgcgtcaccattagcgtaccattttttctctatagcggccgctgcattttgattaccagcttttgcggctttaacaagatccgctgcaattactaagtgatctttaattaatgcactatattttttcactgcatcctcaccgtaaaatggttcaagtgatagtcccatatgtgttgcgttttgtagaagtcgtccaacagtaacattaacatctggtaaattaaatactatacttataatagccaatctcgtccaagcgacgtgttgttcccataaagaacgcatatacccttttaaaaaattctcatttttactaattcggtagttccgtacggataaatcatagtttacataagggttatggtagggggagtaatacgattgccaataagaatacataaatagtaacactcctttgaacatgtataactcaaagtatgatgaagatttatttttagttacgtgtcctagattatttttagggaatttgaaatggagaaattcaatgaatggtgttgtggtatatatgaataaattgaatataaagtaaaagagggtctgtaagggaagttgcagaccctcaaaagggtattgccgagatgtcggactcgactacgtaatgttatcataaaattcttttgaaaaaacctggtaaatgtgtccaaatgaaattgggaccttcatacagtcaaagggacctgcttcccgcggcaggccccaataactagataatgtcgatgagcaaaaaactcatctggagtacttttatagtaacaagtaaaatgtgttttgtgtattgagaaagaagaattgcataattatatgtgaacaatttaaatcccaacaatttatgattatcattaattgttgggatctaaatatggttataaaatggagaaaagacttggaagtgagatcgaggtacacagaagtatgtaatcatgaaaaagacctgctaatataagcaggtcaacttaaggggtttatccaacagattattatatatggtaacaactgaattgtagtaagtctatacatttaatattgagaaaaattctgtgaatgatatattttttgcacatatattaacgtctaaaaagttgagaaagaaaattaaaaagctttttataagagaataatggctggtacttatagtatgattcatatttccacgcatcattattagagaattggagtttttgtgttttcgtttttgccttgatggaactcatattacgatgtttcatatagtaacctcctgaatttatatgtatacgattagtagtattcaagaaagggaaataaaatgaacatttaaattgaaactctttcttcttgtgtactggatttacgttataaatgttgtaaaacatataaaataatgatgctaattcatattaaataagtgaagaaacatagaataatgaaaaaacaataagcatctaatcatccctttcaagtcgcataagtgattgatataatagaagtagatgaaagataaagaaaagcgggtgactcttttttgtttactaaagcacaagaacttttagcgtcctactttggttattcttcgtttcgaagaggacaagatgaaacaattaaaaatgtactagatgggaaagatacggtttgtattatgccaacgggtggcggtaagtcgatttgttatcaaattccggcattagtatttgaaggaacgacgttggttatatcgcctctaatatcacttatgaaggatcaagtagatacattggtacagaatggcatttcagctacatatattaatagttctatatctattgcagaagcaaatcagcgaattcaattagcgaaacaaggacattacaagttactttatgtggcgcctgagcgtcttgattcgatggagtttgttgatcaacttattgatatgaaaatccctatgattgcgattgatgaagcacactgtatttcacagtggggacatgatttccgtccaagttatttacatatacatcgcatattagattatcttccagaaaagccgctcgtattagcattaacagcaacagcaacaccgcaagtacgtgatgatatttgtaacacacttgaaattaatcaagaaaatacaattatgacaacgtttgagcgtgagaacttatcgttttctgtcattaaagggcaagatcgaaatgcatatttggcggattatattcgtcaaaatcaaaaggaatccgggattatatatgcagctactagaaaagtagtcgatcagttatatgaagatttgatgaaggcaggtgtttctgtatcaaaatatcatgctggtatgagtgatagtgatcgaaatgagcaacaagaactctttttacgagatgaagtaagtgtaatggtagcaacatctgcattcgggatgggtattgataaatcgaatattcgttacgtaattcattatcagcttccaaaaaatatggaaagttactatcaagaagcaggacgtgctggtcgtgacggattagatagtacatgtatattgttatattcttctcaagatgtacaagtacagcgttttttaattgatcaatcaactggagaatcacgtttttcaaatgaacttgaaaaattgcaaaatatgaccgattactgtcatacagaacaatgtttacaatcattcattttgcaatactttggagaagaaccgaaagaagattgtggacgctgtggtaattgtacagacaatcgcgagagcatcgatgtgacaagagaatcacaaatggttttatcatgcatgattagaacgaaccaacgctttggaaagcaaatgatagcgcaagtattaactgggtcgaagaataagaaagttattgaatttaattttcatactttaccaacgtatgggcttttatcgaaccgtagtgtaaaagaggtcagtgagtttattgagtttttaatttcagacgagttaattgcagttgaacatggcacttatccgacgttaaaagtaactgaaaaagggaaagaagtattacttggtaaagagaatgttttacgaaaagaacgagtagagacaagacaaattgttcaagaccatcctttatttgaagtgcttcgtgaagtacgtaaagaaattgcacaaggagaaggtgtacctccgttcgttattttctctgaccaaacattaaaagatatgtgtgtgaaaatgccgcaaaatgattctgaattgttgacggtaaaaggtatcggagaacacaaacttgtgaaatatggctcgcacttcttacaagcagttcagcattttattgaggaaaatccaaattatgctgaaacgattaagacagaagtagtttcagagcgtaaaaagtcaggaaaagcatccgcaaattctcatttagaaacatatgaaatgtataaacaaggtattgatttgaatgagattgcaaaagaacgtaacttatcaagacaaacaattgaaaaccatttaattcgctgctatgaggatggaatggaagtagattggcaaagctttgttccagcagagtatgaatctcttattgaaactgccgttcaaaatgcagagggtgggctgaaatctattaaagaacagcttccgaatgaagtgagttactttatgattcgtgcttatttacaaataagaaagtagagacatataaaggggataagaatttatgtatcatgtgttcgtttatggcacattaagaagaggacaaacgaatgctcattatatgcaaggtgcaacatgcatcgcagacagagcttggacatatggaaaattatttgatacgaatgaaggatatccggccatgacttattcgattgaagaacaggtgtatggagaagtttatgtagtaaatgataagatattgtgtaagttagatgaactagaagaatatacaggtaatgcggagactgatttatatgatcgaatcacgcaaacagtatatgttgctgatagggaaattgaggcatatgtgtatatcgctcagaataaaaagatgttaaagaaagtgatagactctggtgactggcttatgtatcaaaaaatataataaggtagttttaaaaattggaaagcagataatgacgaattcattatctgctttttattgtgtgaataattgtcgttctctttttattcttatagttcttagtacgattccaattccgagaaataaaacagtagcagcgaccccgctagtaggatttaaccaaaaatcactactgtttgtaagagtaataatccctgttattgtaactaaaacagtaggaacagcatcctcgattgcatgcatgataacacatggccagactgattttgtaagtctatatatttcaacatacataattgaccaacaaagcataaggatacagccagatagaagcatatttaatcttgagatagattcaaaatattcatttgaagagcctcctttacttttatttatcctattatttgtgggcagtaaaacgcccattgattaaagtctttaatttttacaatatttgttaatggataaattaaataggagacaaatagaaagtagtatcttttgtatgcatcactatactatatgtgtatttgtgtgattttgatgttgcatattctttttaaattagaaagatgaaaagtaagttttttcggaaaatttaaacggaaactattgactttatgattgggtttttaatacaatgatacttcgactgaaaaattagaacggacaggagggaatcgtcgaaatgagcaacatatttgaagatgagttacaaaaaatgaaggatactttacatacgatggatgagcaattggataagcttgaaaaaaccccggtttattatggagaagattttaaagagcaaattcttgaaagtatgagggagtctaatagacaaaacttacgtattggtgtgcaagagccgtactttggaaggttagattttcaggaagatggaaaagaagaagttatgccgatttatatcggaaaagtaggggtttcggatatggacacgatgaagccaatcattattgattggcgggcgcctgtcgccagtatgttttattcatttaccggtggagaagaattagcattttatcaatcaccagatgggttagtagaaggtgatgtgtatttaaaacgaaacatttccattcgaaaaagagaacttgaacgtgttgttgatacatatgtaaaaggaaatgaagatgtatcgcatgccgatgattttcttctatatcgattaggtgagaataaagataataagctaaaggatattgtttcaacgattcaatcggaacaaaatgatattattcgagcggaaagaaatttaccattacttattcaaggggttgcagggagcggaaagacaacaattgctttacatcgccttgcttttttaatttatgaatatcgtgaacaactagaagcagaaagaatgatcgtatttgcgccgaatagtctgtttttagactacatttcgagtgtacttcctgaattaggtgtagggaatattagtcaaacaacgtttctggattgggcattacgtacgttagatgattcagtgaaactaaagcagacagaagaaaaattgaaagaagcattttcaattaatcgtgatgaaaagaagataatgctaggtaaattaaagggtacgttggaatttaagacgtttattgaagagagaatgatccaatttgaaaatgagttagttccgacaaaagattttgaggcgtgggatagagcgattattccagtagaagatattaaaaaatggatgcaagttgaatataaacattatcctttacagaaaagaagagaacgattagtaggacgaatgaagcgctggattgaaattgaacttaaaaaattcggggaaacaaacgagaaaaaattacttaaaaaagaagcgactaagagactgaacgcatatatgaagttttggccgaaaatgagtgctctttcactgtatagttcaatagtaaaaagtaaagaaatactcgaggtattacctgaagaacttgttaaagaaacagaaaagagttgtcgtaaaaaagaagtgtatgtagaagatttaccagctttaatatacatacatcatcgtataacagggattgaaatcgggcagaagtttcatcacgttgttattgatgaagcgcaagatttttcgcctttccaagtttatgtattaaaagaaattacattaggtaattctttcactatattaggtgatttatcgcaagcgatttatgattaccaaggaattgaagattggaatgcttttaaggaagtattccaagaaaccggttattatgaattgacaagaagttatcgttctacaaaagaaattattgaatttgcaaatgaaataattaaaaatgcagaaatcccagtaggactcgcaacaccagtcttccgcagtggggaagatgtgaaagtaattcatgcggaaaatcaatttactgaaattgtgaagacggtaaaacatttgcaaaatgcagatgtgaaaacaattgcggtaatcggaagaacagaagatgaatgccgtgatatatatgtggaattaacaaatgcaggattaacggtaaacgtaattgaagcaaaccaaagtaaatatgaaggtggtatatcagtagtacctgtctatttagcgaaaggtttagaatttgatgcggtgcttttaattgatgtggatgaagaacattacaaagacacaaaacatgatgcaaagttactatatgttggatgtacgagatcacttcatgacctatggattttccatagtggggaagcgtcacctttaattaaaggattaaaataaagtgaaactataatcagtggggagttttactgcaagctaatgtgagataaatataaaaagagggtttctattactgtctacttaacagggagatgactatgaagaccctctttttatattgaaattaatgttcaattttaaacgaataaagccattaatattaaatcttgatagctaccatccaattttacaccctttgcttttctaccctcttcaaagaagcctagattcttatataattggattgcacctagattatcttccattacctcaagacaaactttttcaatcttactgttatttttagcccaattgattaacgtttctagaagagctcttccaataccataatttcgatattcgggtagtatggtcatcgcaaaagccccttgatgactaattttttctttgtttccgttcttaaaatctattgcaccgactaacttaccatcaacttcagcaataaactgtacataatttggattttcatgataagcttttaacgttttttgaatagcatcgatacgcaccttttttacatcctcaaccgtacttagcatgtatggagcgtttattaaagcttttgaagcagaatctagtattctttctgcatcccgttctttagcttctctaattattattgtttttccatccttagatttataagtaaaaacattagttgataagatactacacacaccctttcggaatataattagttgaattttttaactatcatgcaattattaagtaagaaaaagtcgtatcacctttttctgcaatcgctctacttcaacttaatgacgattatttcaaatatttttaatttttacaaggatttattccgttatatagcccgattgttgaataacatgactggcgttttttaaacaactttattatctctgtacacgatgaattaacgacttgagctgttgtgtaaataatatacaatgaccttttctaattccttagtttgttctttttcccgtacacgaacggcatctactggaatttgtgtatgttttaaccaatctagaataaggtgtagttgttcttgtatttgcccaatgttttgctcctttatgttcttattctgaattctatcaattaattgaagcatatagggaagtttttctatacattcacttaaatctccgcaataacctgaagggaattcatgtgtaccaaattctaaagtattgatgtaattagaaactaggtatatcatggcttcttgttcggtatcaccacctaattcaatcgcttttcgaagggatttttctaaatcgtcttctttattgctagagtccatataaattcctatccatctaaaaggtcttgaatcaaatgggttgttttctgtccatctatatagaatgtcaattagaaaactatttagtgagaaagttaagacctcatctttttcgtttaatacatctaaaatagtaaacagcgaaatggcaaactcttcttgatcttttgattcccatttctttgcatttgtaataaatgtctctaaatgtttaaaagctaattttcgaagtcccgcttcgcgatgctgacagtaacaaataaaatcatgccaatgctcagttgtattcatatgtataataatagtttgtaatgcagtgagaggtttatccattataagtccccaatctattaagcacgtgttgaaaatttagtgttattatatcattacataaattaaagtgggaagaatttaaggtggattttattggtcacgggatccaatcgattggtaatgtagcggttctaacaggagtcattattgactttgaagatgaaacgtaaaaaagttattatgtttatctgaatattgagggaatacaagaattttatttatttaattttcagaaaaaatagactaaaacattaataaatggtataatttccttgttattggaattaaaatgaaaatattagaagaaaaaggatagggttggttttaatgggggattctgatcacaaagaaacaaaggcaatattaaagttatggtttatttatataccacttgcatttggagaatttgtcttttcgaatatcataggttatttaaaaaaataaagattttgtatttgaaaaacaattaacctaatttaattgtttttttatttttctctaataaaccaaacaaaaataaagattttgaacaagatgaagtttatgaaggaaataacgttgattaggtgctgaaaacgggaattattcaagcatggtaattcaccgtttttatagcttcctatagtgagatgttatgttcacatcatatgtatacgatatttgtaacttaatatagcattactggaacttcaaaattagtagttaaggttgttaccttatagagtgttatatataacttagctaaaaaagcacaaatcatataatttgagctgttcattatctgttttttggtaaaaaattatagtttttgtcacattaatactgtacgatacatagtataaaacacatactgtatgacatatagtaatggaaatgaggtgagtgaatggataatttattaaattcgttaattactgagttaagaagagggacattaacgttagctgttttaagtcaattaagaacgccgcagtacggatattcacttgtccagttattagagcaatcaggggttacaattgatcaaagtactttatatccactacttcgccgattagaaaagcaggaattagtgacgagtagttgggataaaacggagagtagacctcgtaagtattatgttttaagtgattatggattagaaatatttttgcagttgaaaaaagaatggataaaggattcgaaagaactttataacttattaaaggaggaggaagagaatgaatttaattgatctctatatccaagaggttgcgaagagattacctgaaaaaaatcgtgaagatattacacttgaactaaggtcaactatagatgatatgttacctgaagattataatgagaaagatgtaaagagcgttctcgaaaaattggggagtccggtttcattggctaatggttatttggatagaccgatgcatttaattggaccacgttattttgatgtatatacaacgttgttaaaaatgattataccaatcgcagctgtcattgcactcatatcaatggttgcagaaaattttataggctatagtggtgatcaagcggtattaaatgttattttacaattgataggtaaaggcattggggaaatttttgaagtgagcctccatgtatttttctggttgacagttgtgtttgttattttagaaagaacagataaagacaaaggtatcgagccgttgacgacaagtttaaaaaaatggacaccagatgatttgaaaaacatctcgtatatcccaaagaaaaaagcaatctcgaagtttgaagtttttggaggtttaatgtggacagcagtttgggctacactttacttttatgcgaattatcttgttggcgtatataacggtacggcaaatggactgaagtttgtctcgccaacttttaatcaagatgttttattgcagtactggccaatcgttgtaattatgatcgtttttgaaatatgtatatccctttataaattagtgcagggacaatggacgcaaagattggcgattgggaatgctattcttcaaatagctgggacgatagtattcattgtaattgtagtaaatccacatgtatttaacgcagggtttattacgtatttggcaaatgcatttactatttcctcagaggagtttaaaacgtggctcattgggggaggaattttcttctacatgttatctgctgcaataaatatatttgatggtttccgaaaagctagtattcgtatgtagataaaaatcggaaatttcgataaaataaaactattaaaaagatagtaaaataaggtgaacatgatgaaaggaagaaaataatgataagggaagcaacgaaaaaagatttagcatacattttagatatttataacgatgcgatactttatacaacagctgtatatgcgtataaacctgtaacccttgaaaatagaatagattggtatgaacaaaaaaaggctgaagagtatccaattatcgtatatgaattagataataaagtagtaggatttgcgacattcggcccatttagagcgtggcctgcttataaatattcagttgaacattctgtgtatgtagataaggcatatagaaaaaatggcattgggtcttcattaatgaaagaattaatcaaaattgcaaaggaaagagagtatatgaccttaattgctggaattgatgcagagaatgagaaaagtattgccttgcatcaaaactatggatttgttcatgcaggaacaataaaaaaagctggttataagtttaataaatggctagatttagctttttatcagctggaacttaacggtcctgaaaatcctatagaagaataaatatttttcggtagcaagaaaaaattcatgctacctttttcttattttaatagctaatgaaaaggttttttacattcaatgttgaaatattagaagttaatataacgatataaaaagagggatagaaatggaaactgttataaataaaataaaagaggtacaatctaattatgtgggaatggcaatttattctacaaaaaataatcgtatagttgcttcgtataatagtgaattaaatattccgttagcatcagcagcaaaattagtcattggatttgtagtaacgcaaatggtgaaggaaaataaacataattggaatgatatacttcattacattaaatttaatccacatgaagatagtgcgcagttatatccgcatttacaaggaagaacttctttaacacttagtcaagcggtagaggtaatgattgcttgtcatgatagttacgttgcacagtcagttgtaatgcactgtggtggatgggatgctgtgaaaatgtacgcacaaacgtacttttcaaaaattcatatacaagagaatgctagagatgagaaaaatgttggagaattaagtgaagttcttgcccttttcatacaaacctttcaaggttataaatcagaaccagaattatgggaaccaattattagcggcatggtaagacagcaaggagagtatgaagaaattccatattatcatataactcatatgacaggtggattactcacagctacaataaatattggtataataggaatgtttaacgaatttccacttctttatgtgattgggggaaaagatttaccgaatcgccgtgaaaataaagaggtagatgaagcttttgcagtagttttaaagtacatatacaaagaatatagtgaaagcatgctaggagtgagcgattgaaaagaaacttaaagactttaacaatcattattttaattttaacgattattgctcttgaagttggaatcgccctatatgatcacaatttgtcattagatacaatttactttgcagcgatccttatttgtattgtattgctttttggcacacgtgtttctgaagagaaagaaagtacatcgaaacgagagcgaagaaaaatagctgttatattttggccatctattttattgtctatcgcttgttttgcagttataaattacataagggtaggctatgtctctgtaccagggataattggcttttcatgctttgttacatatggtggattcgttttgattagtattttaaaggggaaaaataaaatgtagcttactaagttgaaaggaagcaatgtatatgaaacatatagagaacggtacacgtattgaaggagaatacattaaaaataaagtcattcaatataatatgtccatcttaacagatgaagtaaaacagccgatggaaaaagtaagcctcgtagtaaaaaatgaagaaggaaaaatatttggtggtgtaacaggtacgatgtatttttatcatcttcatatcgactttttatgggttgataaatcagttcgtcatgacggttatggtagtcaactgttacataaaattgaagaaattgcgaaggaaaaagggtgcagattaatattgctagattcatttagttttcaagcgccagaattttataaaaagcacggttaccgagagtatggtatcgttgaagatcatccaaaaggtcatagtcagcacttttttgaaaagagattataataatattatgtatactgattgatgggagaaagcatatgtacacgtataaattgcaacaagaacaaccaatctgtgcagaaaaaattaagaagctttatgattctgtcggttggtggccagaaagaaaagaagtcgatattgaaaaaatgttaaagaatagtatagccattggagtatgggaagaaaatgaattagttggatttgctagagtcgtttctgatggtgtttttcgagcatacattgaagatgttgtcgtacatgagaatgtaagaaataaaggtattggagagaaaatgcttacaatgttacttcgagaaatatctcatattgatattgttagtctattttgcggagagaagctaataaagttttacggtgagcagcaatttcaagcaacgaagcaaattgtgatgcatcgtaatcaaacagggaaagaataagaggtgccaattaaaatgaatgcaacaagagcgtactgtttatcgaaaagaaaagcgacagaagattctccagatggctggagtgcaacatgtatgaggcttaataataaaatatttgcgatagtaaatcatgaagaaggtgaaaaggctgcgattacattgaagtgtgatccagaagtcgcattaagaataagagaagattatccagaaacaattattccagggtatcatatgaataaaaaacattggaataccgtttatattcataagggtatagagcaggagcaaattaataaaatgattgattggtcgtatgatttagtactacaatcattttcaaagaaaaagcagcaggagttaatgggttaatatgtattaggagtgtgtgtaatgaaagattcgattaaagatacgtatgataaattagcgagtacatataaagaaaatctagatttcgcaaatccatataacagttattatgaaagaccggcgatgatggagcttattccaaaggaactagaaggaaaaaagatattagatgctggatgtgcagctggatggtatacttctcaattcataggaagaggagcaaatgttacagcaattgatgtaagtcctgaaatggtaaaagcagcaaaagaaaatataggagaagaagcgacgttcctttgtcatgatctgcaagaaacattgccatttgaagataatacgtatgatgtgattgtaagttcattaactcttcattatatagaaaattggaatcaagtatttcaagaatttcgtcgtgtattgaagccaggtggagaacttatttattctattcatcatccttttatggatttcacaaagtttccatgtgaaaattattttgaaaaacagttattaatagatacttgggttaaaccgaatattactattgaagtcaagttttttagaagatcattacaagacatactaaatgaaactacaaattattttgtattagaagagatagtggaaccgaaggcaattgaaaaaatgaaagaagtaagcgaaaaatcatatcattatttaaatatgaatccacattttcttatcataaaagcaatcaataaatagctagtaaaataactttgttttactagctatttacagttttacattacatattaggagactttaaaatgaatatgaaacgaaatagagtagtatatgcactatttactatagttgttattattttaggtcttagctcaagaaagtttgcttttgcactaccacatctattaaatgattatttaggtgatgcattatgggcattaatgattttcactggctttggatttttgtttcctaaaacagagacgaagaagttggcttttattagtttaatgttttgctacgggattgaagcgagccaattgtatcatgcggaatggatagatagcattcgtgcaacgactttggggggactcgtgttgggatacggttttttgtggagtgatgtagtggcttatacaattggtgttggagtgggaatactgtgtgaggttatttttcggaagaaataagaattgtaaaaggggtatttgtaaatggaacaagcactggaaattgcaaagctttggtttcgaaatgaacatgtcacagctactgtaatgcaaccaaaagtagcgaaggttttatgcaagaataaagagtacattttaaagagaacgggatcgataaagcaacttctagttgaattcgatgttttgaagcaactgtatgaaaagggaattaaagtacagagagtagtaaagacagaaaatgatgaacaatatgtattatataaagaaaaatattattgcttatatgagtatgttgccggaagtgttttagaaataaaagatacgaataagctggaaaggctagcaagtacaattggagaagaaatagctaatctgcacaaagcattacatgcggtgaatagtgaccatgagttaataaaaagagatttatataagatggtatttgaatgggctataccgattttagaaaagaatgagtatgttcatcgagaggtaattcaaaagatggagcgaatgcacgcagctttcaaggaaacggtccattcattaccgagacaaattattcatcgtgatatgcatctatcaaatgtaatctttaaagatgataaactggaagggtttatagattttgagattttagaaaataatgtaaaaatattcgatctatgttattgctgtacaagtgtattaagcgagctatttagtaatgaaagattaagagggaaatggttacatatcgtttgcaaagtctttgaaggttattataaacaaaatgatttaacgaaagaagaactaaaagctatttggtatgttatgctttcaattcaaattatctttattgcttattttgtccagttaccagatttattaaagttaaatgaagaaatgttcttctggatttttgctaataaggaagctattgaagaagttatagaatgtatcgtaaaggtatgaaaaaaataatattaattggttctggtggttcaggaaaatctacattagcaaggcagttaggaaataaattaaatattaaggtgcatcatcttgatgcattattttggaaaccgaattgggaaggtgttccgagagaagaacaaatagcagttcaaaataacttaattaaagatgagaagtggattattgatgggaattatggcgggacgatggatatcagactgaatgcagctgatacaattatcttccttgatattcatagaacaatttgtatttatcgtgcgtttaaaagaattgtaaaataccggaataaaacaagaccagatatgggcgcgggatgtgaagaaagatttgatttgcaattttttaaatggatatggaaatatcctaatgctaaacgacctacaattttaaaagggttagagcaattgtccgaagagaaaaaggttattgttttaaaatctccaaatgaggttcggaaatttttagagcacatataataatacaatgtgacacaacaattctttttggatcttaccgattagtttaattaaactaatcgttttttattatgaaaaatttaacgctttttgaaaattgtattttgtaatgagtatatgactataaattcatataaaatgaacgtttggaggaatagaaaatgactaatgatttaattcaaacaatcgattcattaatggtaaatattccagctggagaggtagtattaagagatgatcgaataaaaaaagaatggctagtgcaaattcaaccatttcttcttgcgaagtatgctgtaacaatggaactatatgatgctattacaaatagtccattaaataattttgataaaaatcataaaccagttgtcaatatttcatggaacgatgccattgcgttttgtaatgtactttcaaaaaaagcgggattaaaagaatattattctattagtgatggtggtcaaattgtgaaatgtaatttagattcaaatggctaccgattaccatgtgaggcagagtggcaatatgcatgtaaagcaagtacaaccggatatacatacgggaaacttcatgatatagcgtggtataatgaaaattcaaatggagagattcatgacgttggccaaaaagaaccgaatgcatggggactttatgatatgctagggaacgtttgggaatggtgttatgatttgtatgatgaaacagtgtacggatcatatcgcatttttcgtggtggtagttgggctgaaacagcgagagggtgcggcgctacttgtcgtcgtcgaagccatcctacatttcatatagatgatctcggttttagactcgctaggtcaatttagtaggaacatgctacgaacaactaagaaaagagtatggagaaaatccgtactcttgccaacatagaaacgatttaacgtaaggagtgtttattatggcgcgtgttttatttattaacgctggatcagaaggacatataaatccaactttacaagttgtagaagaattgatttctcgtggtgaagaggtcgtttatttttcaatagaagctttcagggatcggattgagaagacaggtgctactgtacgaacgattgatgatcaaaaatttataaaagcgtttctatctggaggcagaaattatttacaggaaagaataaacggccttctacatacagcggatattgtaatatctagcgttctagaacaaattgaaggtgaacattttgattacatgattcatgattctatgtttggttgtggccatttaattgctcaaattcttaaacttccagccataaattcatgcacatcttttgcgcaggatgaaaaatcctttgagcaaatgttaggtcatctgtcaaaaaatatcccagtagaaattcatgataaaatacagaatgattttcaaaacttaacgaagggaattgctgaaaaatatggtgttgaaataaaatcatcgtatgaagttttctgtaatcctgcacctcttactattgtgtatacaattaaggagtttcagccttttggtgatacgtttgatgaaacatataaatttgtaggaccatctatctctgcacaaatgaaaaacagagacgttgattttacttcaattgaagaaaaaagtccgatttatatttcattaggtactgtttttaatgaagcgattgacttttataaactgtgtatgaaggcctttgagaatagtgagcatacaattgttatgtctattggtaataaaacaaaaataagtgatctaggcgaaatccctaaaaacttcattgtgaaaaactatgtgcctcaaaccgaactgcttacttatacgaaactatttattacacacggcgggatgaacagtacgcatgaaggattatataacggggttccgctcgttgtaataccgcaaagtgcagatcagccagcaattgcaaagcaagtggagagtcttggagcaggagttcaattacatatgaatgaattaaccgtggagaaattgcgtgaaagtgtggagttaattttaaataacccttcatataaagaggctgctttgaatttgaaggaatcattccgaacatcgggtggatataaagaagctgttgatgaaatctttacatttgtaggtcagtaataaatataaagttatacatgaaaaaagtgtctatattaaatgatatagacacttttctgttgtaagaagagaagaattgtttaaatggaaaaaatgaaaatactaaatgtgaattttgagaactaagtctacaatttctgctgcacacttttattttatcccgtattaaccgaccgtaaaaccccaactaattaaagttttactttatgatttcaggatgtggttttatatgttagtaataatttcactgtttctgcacaacttctgcacatgcttaggcgagttctatgtcatgatatattcataaagtgaaatatttcacaaggaaaaaatatattttcactgcggtgtatgcataattaacacatacatcggtacaagtttgtctcttgttattcttttacatcaaagcccacattccactacaaagtataacaagaaggggacatgaacatgaataatcgatttttaaaacaactacaaaatatgaaaatgaacaaaaaaagtttaggagttgtagcattaacagctggaattattagtacgacacttattcctcaaaatgcttatgcgcacggttttgttgaaaagcccggtagccgatccgctttatgtagtccaacttatggtgcgctaaatgtaaactgtggaagtgttatgtatgaaccacaaagtttagaagctccaaaagggttcccacaaggtggtccagtagatggacaaattgcttcagcaggcggaaaatttggtggtattttagatcaacaaacagaaaatcgttggtttaaaaatacaatcactggtggggaaaatacatttacttggaagtatactgcgcctcacttaacgagtaagtggcattactatattactaaaaaaggatggaatccaaataaagcgctaacaagagcagatttcgaaccaattggaactgtacaacatgatggttctgcagcttcaaataatttaactcataaaatcaatgtacctactgatcgtagtggatatcatgtgattttagcagtatgggatgtagctgatacagcaaatgcattctataatgtaattgatgttaatcttattaatgatgtgaaaccagacatagaagcaccaagtattccaaatggacttcagacgcaaaaagtaacagcgaatagtgtagaactaacatggaacgcttctacggataatgtaggggtaaaaggatatcaaatcttccgtaacggagagatgattgatacagtaccagggactcattttattgataagaagttacaaccaagtacagaatactcttatactgtaaaagcaattgacgcagctggcaatgtatcgacagaaagtacagcgcttacagtaaaaacgacagttgagactcctgatacagaagcaccaacacaaccaaaaggattacatagtatgggaacgacagcgtcaagtgtggatttaatgtggagtccatctgacgataatattggtgtagaccattatgatatttatagagaaacagaaggatcaatgaaaaagattgcaacatccaatacaacttcttatttggataaaaatctgctcgctaatactacttataaatatgtagtgaaagctgttgatgtagctggaaatgaatccgtacagagtgatatattcacaattactacaaaaaccgaaagcgcttcatatgaagcgtgggatgcaaaaaaagcatataaaaagggagatagagttctacacgaaggaaaagtatatgaagcagtccagagttatcaaggaaatggtgatccaaactggatatatgcattatcattatggaaaacagtgtaagctttacttaggtatgaactaagagatgatgggctttgatgcaaaaggtaatcttgagaattcacttttctattaataaaaaagggtagtgtatgaatacataagattcatatactaccctttttattatgataacattttcgtcataagtatgtgcggaatgccatcttccataaatatatcagaagaagtttcatagtctaattttttataaaatccttcagcttgtgtttgaccgtgtagtttcactttcgtaacttgttcgttacgagcaagttcttctaacgtttgaatgatgactttacctaatccgtatgtacgataatcttttaaaatacaaatacgttctaattttccgacaccatcaacaaatcgtatacgacctgtgcctacaggaagttcatgataataaactaaaatatgtttacattgctctccgatttcatcgaatgtatcgaattcatctgcaagagggacaccttgttcttttacaaatacttcttttcgaatatgaaaggcagtttctaaatcagcaagttctgttataagtttggattgcaaaatgttcagtcctttctagtgtaatcagtttgcgttttcctagtatatcataataaagcactattaagagaagaagaacatactaaaaagccaactttaaaaagttagcttttattacaatttctttatcccatttttagtaccaataattgctgtactcgtcatacttataaacaaccctgtttcaactacaccagtaatcatttttaattgggtgtgtaaatgggcaggattagaaatatgattagggaatatacaatcgataatcaggttattgttatcggttatataagtttcatcatttttcaaacgtaacgttgtttgacaccctaaagactgaattttattttcggtttgtttccatgaaaaagggatgatttcaacaggtaatggaaaattacctaaatgtgttacaaatttcgattcatcagcaatgataattagttctttagaggaagaggcaacgattttttcacgaagtaatgcaccaccaccgccttttataagttgtaaatttgaatcaatttcatccgctccatcaattgtaagatcaaggctttgtacgtcgtttaacgaaattagggggatatttagttgctgtgctaatgcttcagtttcctttgatgttggtacagcttgaaatgataatccttcttttacacgttcacctaatttttgtattgtccaatatacagtagaacctgtaccaagcccaattttcatgccatcatttacaaagttagcagcatattcgccagcgagctgttttaaattcatcactttactccgccgggcgtggcccagcatcaagacctgaattttcaactgtaagtaccggacgaacgactatatctttatgtacacgcatttgacaagataatcgtaaatgatcttcaattcctttttccgtcattgcatgtttctcattcgcactcgcttcacagaaatcacctgctagtatttctactctacaagttgtacaacgtgcattcccgccgcaacgatgaagaatgttgacaccgctatcttcaattgctaatactaactttgttccttctttcacatcaaaagttcccgcaccttcaattgttaattttggcaaatttgttcctcctcacgtaaaattgtacataacatatttatgaccgcgaattattgaacataaacattatttttttatatccccgtaactttttttaatgttgaatcgtttattaagtaagcgctgaaaaggagtggttattttgtgcacaaaagtaactcatgttttaaagaatcatatcgatatgaatcattcaaatataaactttttaattgaacaatatggagagttaaaaagatactgtacttttttaacgaaaaacaaatgggatggggaagatctcgcccaagaaacagtgtgtaaagtgcttcgaaaatatagaaataaagatatttgtatgacactcgtctataaaatagcaagaaatcgttggttagatcagatgaagtctaagtctgttcatgaaaaaataagaggacaaatcacttttgaagaaccacatgagaacattgcagatttgcatgaaatggtagggaaagtattgtcttcattaaatgtacagcaatccgcaattttattattaaaagatgtttttcaatatagtatcgctgatattgctaaagtgtgttctgtatcagaaggtgcagtgaaagcttctttatttcggagtagaaataggctgaaaactgtaagtgaagaagggattgagatagtcgaattcacagaggatattgaagttgttgtaacatctattcgtgaggaaagaccagaattattaacgaagcttcttccgacaatagattttactaaattaccatctaaacagccagtcttattatttaatgtgaaaaacccttcttcctacagttatatgctttacgcagcataacaagtattggagggatttaaaatgaatgcaattccatatgtagtagaacaaacaaaattaggagaacgttcctatgatatatattcaaggttattaaaagaccgcattattattatcggctcagaaattaatgatcaagtagcgagtagtgtcgtagcgcaattattatttttagaagcagaagatgcagaaaaagatatattcttatacatcaatagccctggcggttcaacgacagcaggttttgcaatattagatacgatgaatttaattaaaccagatgtgcaaacgctatgcatgggctttgcggcatcattcggtgcattgttattattatcaggagcaaaaggaaaacggtttgctctccctaacagtgaaattatgattcatcagccgcttggtggtgcacaagggcaagcaacagaaattgaaataactgcgaaaagaatattaaagttaaagcatgatattaataaaatgattgcagaaaaaacggggcaaccgattgaaagagtagcacatgatacagaaagagattattttatgactgcagaagaagcgaaggcatatgggattgtagatgacgttgttacgaaaaaataagttgaaaacaggctagaggatatcctaaccctctagcctatttttattaatcttttatccattcattaactagcgcttgattcttcttaatccattttcgcgccgcttcttcgggatctttcgttttatttaactcgaccattaatgtaccaagctgttcatcgttcatcttccatttgtcaaagtattttatgatatccggatggtctttttcgaaacctttacgaacagagtaataaatgtcatctttttcaccatatactttcttagggtcttttaaatattttaagtcaaattctgaaaagccccaatgcggattccaaagcgtaacagcgattggtttctttttcgtatatgctttctttagttcactcatcatcgcagcttcagaggattggacaagttttagttttatatcatattctttcattgctttattcgttaaattcataagactactaccgggttcgataccgacaattttattctctagttcatctttatgagcatttaaatcttcgatactgtttatgtttttcatataagaagggacgactaaacctagtccagtaccttcgtaccattttgattttaagacaatatcatctttataacgatcgtttagcggtttatctgtaactggtagccatacttctaaattcgcatcaacatcaccacgagcgacaccagtccaaattgcggctttttctaaatacatgagctcaactttgtagcctttttcttctaataaaactttccacatgtttgcggttgcaatattttctttccaacttgttacaccaagtttaatttttcctttcgaatttgcatttgttgcattacatgaagtgaaaatcatagtaataaataatgcaaggcatataaaccaaattttctttcgcatcgaaaacctcctaagtaacgtttgccttataaaataaatgtataagtaagcattcttattatgaacggaaacgagaattttaaagaaatcttatgaatgtcatttttatgtaatatttctttgtaaaatcgcaacactatgtgaatagatgggtagaaaaggagtagtgacatggataatacaaaggtgcgtgttgaaaacgtaacaaaagtattcgggaaacatccgcaaagggccctttccttattaaaagaaggaaaaagtaaatcggaaattttaaaagagacaggaatgaacgttggggtgaaaaaagcaacgtttgaagtttactctggagagattttcgttattatgggtttgtctggtagcgggaaatctacgctagttcgtatgttaaatcaattgattaaaccaactgcaggtcatatatacatagatggtgaagacatcgcaacgatgggaaaagaagagttacggagagtaagaagaacgaaaatgagtatggtatttcagaaattcgctctatttccgcatcgtacagttatacaaaatgttgcatatggtttagaaatacaaggagttccggttgaagagcgagagaaaaaagcgttagaatcgctacagttagtaggactcgatcatcataaagataattacccaagtcaacttagtggtggtatgcaacagcgcgttggaatcgcaagggcactaacgaataatccagatgtattactaatggacgagtcattcagtgcattagatccacttattcgaaaagaaatgcaagatgaattgttagagttacaagataaaatggaaaaaacgattatatttattacgcatgatttagatgaagcgcttcgaattggagatcgtatcgcattaatgaaagatggagaaatcgtccaaattggaacaccagaagaaattatgatgagccccgctaatgaatttgtagaaaagtttgttgcggatgtgaatttaggaaaagtaattacggcggagtctattttaaaacgaccagaaactttattaattgatcgtggacctcgtgtagcccttcaaattatgaggaatgcaggtgtttcaactgtatatgttgtaaacaaaaagtatgagtttttaggtatattaactgcggatgatgcgagtaaagcagtacaaaaacagtggccgattgctgatttattacttaatgatattccgcatgtgtatttggatactttactggaagagacatatgcaaaaatggcagagatgaaatatccgttaccagtaatcgatgagaagaaaaggctaagaggaattattaaacgtgaaagtgtcattcaagctcttgcaggaaacattgaggaagaggtgaaagacgatgaatagtataccgcggattccattaggggaatgggtcgactcatttgttgcaagtttatatgagcactttgaaggcttattccgaggattctcttatattattggcggatttgttgatttactcactaattttttaacaataatacccgccatattgatgattattatcttatgtttcctcatttggtacacaacgaggaaattatctttagtcatttttacgcttattggattattatttattttgaatattaactactgggcacaaacaatgcaaacattagcactcgtacttacgtctgttattatttcaattattgtcggaattccaattggtatattagcatctcaaaatgaacgtttctcaaaatttttaaaaccaacattagattttatgcaaacaatgcctgcattcgtataccttattccagcgattacatttttcggagtaggtgtagtacctggaattattgcatcagtaatctttgcaatgccaccgacaattcgttttactgacttaggaattagacaagttccagaagatttaattgaagcagcgaatgcatttggatccacagcatcacaaaaactatttaaagtacaattaccacttgcaaccggaacgattatggctggtgtgaaccaaagcattatgctttcgttatcgatggttgtaacagcatcacttgtaggagctccaggacttggagttgatgtatatcgctctgtaacacaagttaatatcggaatgggatttgaagctggattagctatcgtagtaatcgcaattatattagatcgaattacacaagggttccatacgaaaagaaaataatgaataaaaaacacacttttataatacaaagtgtgttttttattgcatccagatcacatacgaacgataacagaacctccagctggtgcacaaacttggtttttttgttgttccattgatttaattaattgattattttcctcgattaatgagattaatttagttaattgattttcaagacttgcaatacgctgcatcatatattgtgaatcatgatgcaatgtattccttgcgggatgaggggaataaacatactgttgatttatatttggattccaatgaggatacatttgaatcgttcctccttcaataaattacgaagctttcttatagtaaatgcctatgtataattaatagttacttgaaaattttccaatataaaaggagtatgtacagaaaatggaaaatattatatgtaaagttacagtacattttttggaaatatttaagcgagatagtccttatattaatacattcaagtaaatgtatgttatttagggagaaatgatgggaggagatgtaattttggctaaaaataaaaaaagaaatgatgctttggcaataggtgtcggtataggagttgtaattggtgtatttcaagggcactttacaaataatttagtaatcggaattgtgattgggattataattgggattgcgtttttgaagaaataatgagatgtaaattcatttcaaaaattgttgtatcaaaagaatgaaaattcggaatactaaacctgtttttcctttttttgtgatattatatatgaaaaggaaggtgatggatatgtcaacaaacaatcaaatagaacaaaactgtttcatttgcaaaaaacatataggaaatattatagttccaggtggagctatttacgaagatgaactcgtttacgttggacatgtccactgggatagtgaagaaacatacctgggttatgtaatgatagatataaaaagacatgtacctggccttgctgaactaacagatgaagaagcgaaagcgttcggacttataacaagtagagtaagtaaagcgttaaaagaaagcgaaggtgcagagcatatttacacttttgtttcaggaaatggtgtaccacatatgcatatgcacattattccgcgttatccgaatacaccaaaagagttttggtcaccaaccgagatagcgaaatggactggcgcaccatatggtgacgaagagaaaataaaaaaactatgtgaaagaatacgaaagtatatggtaaatgagtatgcatacaaaaaataatacacaatattcatgggttggaaatatagaaatgtgtttaggagaaatttcagttaaacaatatggtgatattgtacttggtaaatatggtgggaatataagtgctggagcgaaaaagaatgaagatggtgcattagtttggtcaaatggtgaatgggaatttgcagctattctagatggacataatagtgcggaaagtgttgagttagtagtaaatacaatcgaaaaagaatatgaaaatataaaagtaattttgaatgaaccaattaatacagtgtttcagtctgttgaaaatcatatacttacaatttttcagtcatcttcatttaaggaaaagtgcaaaaaaattaaaggtgaaacagcttgcttactatgtgtaaggaaagaaaattatatatggtggctttctatcggtgattgtttagtgtatgtatttcatgaagagttacataagttaggacaatatgcattaaatcaacgtcatttttacgaatggattggaaatgtaaacacatttgatttacctgttccttgctattcatcaggtattcgtgaattacgtactggaaagaaccgaattgtaatggtgacagatggagtattagaatgcggggagcgccgatatgaaatacctttaaatttgcatattgctatgcacagaaatgataaaacacttaaagaaaatattcacaatgttttagaacacgtgcatcatcagttgggacgtgatagtgcgacaattattagttgggacgtagaaaataaaaggaatgctacgtatccgagtgatcagccggagaaaaggtaaaggaggaaacatcactgttttgggttaaaggaattttattaatagtatggattatatccttagttgtttttgaaaaagtagtgaggaaaaaactaaatataccgaaacaaacagactggaatagtaaatatgtaaacaactttcataaatggggcactagggctcttattatttcttatataatttttacgatgatatgtgctactttaaatcccgtttatattagtaatttacccattttatttttaataactttatactgctttcaatcatttatggagtggaaatttgataaagaatcgagggaatatgtcatttctttaggaacggttccgctattagtaataacaggaattattcttaattttttcttttatacctattggatttaatcatatgtggaatgaatggggagacaaaatgaaaaatcctaaattacgtgctgaagcaatgattttaaatgaagatcattctaaagtacttgtacaatgcaatgaaaatgaatcattttatcgttttccaggtggctctattgaatttggtgaaacgtcaaaagaagcaataattcgagagttaatagaagaatacgatttgaaagttgatgttcaagagttagcaattgtaaatgaacacatttttgagtgggacaacgaaaaaggtcatcattgtacattgatacattgggggactgttgaaaaaatcattacaaatgaaataaggcataaagagcatgaggatattatattaatttggaaaagtctagaggaattacaggagaagccgacatatcctgaaggcatcataagttatttagaaggggataaccgtaatatagtccaatttatttcaagtaattaaatgaaataataggaggggggaaaatgggaggttctactttttggattataactattgttttttgtatagctgtctattttctcgataagtttttaagaaaaaaattgaatatgcccaagggtggtttttggggatataaaaaacatgtaaatagtttacataaaaaattggaaataggactactttttatttatttaataactagctttatgtttatctttaaatttgaaagtattaatattgcttatgtcatttttacttatttaggtgggacgttaatcttaagagcattgatggaatggaagtatgatagagagtcgaaagaatatatattttcggtaattggggtattcacgtttatttttatgacttcgatactattttacttctttccacctgctgtataataaaaatttgatagtacaaataatgaaataactaataaacaagaaaccatttactactaaatggtttcttgtttatttaagcatttattttagttaatatagatgtaatgaaattagttttatcctctgcatacttatgtttatcagtaggattagcttgtgaaagttgaatctttaactgttcatactgcatgcgtgcagttttattgtctattaagtaatcacgaaattgtaattgttctattaaatatgtattcccttgttcatacatatgaatttgatgagttcttggttcacctttattaaaatagtatctttcgggtaatacttcttttctatatttatagtttagtagttctaactttttaatacaatgtataccgtccgtataattttctaattcaattgctatatcaataattggctttgcacttaaatatggaatagaagtactaccaatatggtgtattgctaaaatatgttcgccaatttgttcctcaatgagttgtttctctttcataaactcaatttcccattcttcagtccacggcactaaaaacactttcccatacggtaaacctaacatttaattagcatccctttcaaaatagttttcaaaaagtttattacattttcttaaagcttctcaaaacaaggtgttcccacaatctccaaggaagaatcttcttcgcaaagatcataaatttcacacctttaccgattggatatcgtaaatttgtacgcttagattcagcaatttctgcaattttattagcaacatctatcggattaccaaatgtatcactgccgctattaatatgtttttgtattttatccatatactctttgtaaggagatgttgtatcagattggttttcagcgagttgtttcccaacctcccatatgtttgtgttataagaacctggttcaattaaagcaacatctattccgaaaggttttacttctaagcgaagtgattcactccagccttctaatgcatattttgaagatacataaggagataaaccagggaatccaacttggccgctaatgctgctaatattaatgatttttccacttctttgttttctcatatacggtaagacaagctgagtaattgatatagccccaaataggttcgtttcaaattgtttgcggtattcctctactggaatttcttctacaaagcccccatttgcatatcctgcgttattaataagtaggtctactctgtttattgcttttatatataattgaaagttatgtatagaattttgatctgttacatctaattgttgaacttttatattttgctgtaagttgagttcagtaacttgagatagtaaggttccttgtttttctaggtttcgcattgtagcaatgactaaatagtcttttttcgcaagttcaagcgttgctaataggccgaatccacttgaagccccagtaataattgcaatttttttattcattgtcggctcgctttctttttcttttatcataacgagatataaaggtaaaagctatttattgtataaagatatttgttataattgaaaatgattatcaattgattgtaatttgtatataaaaggagtgtggatttcatgaagactaacagttttcatgatatttttagtaaatattttcatgggttacaagttgtagaagaaagatatatgtatgtgccaaaaacaataggtatgggtgaagtgcgaaggtggagctcgttttctggaatggaaatagtgctatcaaattaccagttccataaaaaccatcgcattcaatttgcatcggatgcagcaatggtggaacttaatttttgtttacaaggatccggggaagtacaagttggttactctacaaataaattaatggctgggaatagctatttatactttatgaatgactttgaagttctatttgaatatgaaaaagaaactccactatattcattagcaattggaattcctgtacagttgtttaatcatttcatgctaaattgtgctattgaaaaaagtcatgattttcatactataataggaaatcaatcttttaaaaagtttcaaacccccattgatgccctaacatctaatattattaagagaatgttagagaatccccaaaaggatcgtattaatcaactcgaaatagaaagtaaagcgctcgaattgctttctatatactttgggaaagtattactgaatgatcgtgatgcaaataaaaggagccaattatccaaaaaggatttaaataaaataaaacaagctgaagaaattttacttcaaagaatggagtcaccccatgcccatcaacttaaggatagaaactctacggttttccattaattgaaatgagtaattctacacatgtatgactaccaatatatcctgctccacctgttacaagtactgccataattaacaaacctccccattactacatatccttataataagcatgtaaacattaatctagctagaatttaaaatagctaggttaataaaaaatttctttatttataaaaattagtcttacagattttcatcctataaattacccactaattataaagaaactttttcacgaactacagctggtcttcctacggaataatagtctacattaaactttttcacatattctaaaccatggcaattacgaccatcaaaaataataggttgtttcattaatttgatatactgttcaatagggaattcttttatatcatcccattcagttacaataagtgttacatcggcatttttaactgctcctgcaacagagggcacatattgaacctcattaggtaatactttctttgcattttcagtagcaattggatcataagctacgaccttcgcacccatttttactaaatcatttgcaataacaatagatgccgcttctctcatatcatcagtatttggtttaaaagctaaaccaagcatagccacttgttttccttccatatcacctaatacattttttattttttcaacgagcgatgcctgctgattattatttactgtaataactgattttaacagatcaaaatcatgctcgacattaccagcaatttgtattaaagcatgtgtatcttttgggaaacaagagcccccatatccgatacctgcttttaaaaattgtgtaccaatccttttatctaatcccataccattagctacatgctctacatccgcacctaacttttcgcaaatattagcaatttcattaataaagctaatttttgtagctaagaaagcatttgctgcatatttaatcatttctgaacttctaattgttgttttaaaaacaggaacattaaaaggtttattcacttcttccataacatcagcagttttagcatcatcagccccaataactatacgatctccatagaaactatcatgaattgcagaaccctctcttaaaaattccggattcgataccatgttgattttcacatctgctttcaaattttgctgaattaaatttttaacatgatcatttgtaccaactgggaccgtacttttaattactacaatcgaatctttttttagattattagcaatatctaaagcaacttgctcaatatattgtaaattagccgaaccatctgtttgttgtggcgtacctactgctatataaataacatctgcttcttcaatcccttggcgacaatcggttgtaaataacaatctattatcattaatatttttactcatcaactcatctaaaccaggttcatatattggtgaaataccttctttcattttcgcaactttattctcattaatatcaatacaagttacacgatgtccaatatccgataaacaaacccctgttactagccctacataacctgttccgaaaatagcaatattcattttttatcctccttatttattaacaataaaaaaagccccttaaagaaaaaggcttttaaaacttatttaacaaaatgttttacaactccatttagggcataatttataaagcaccatgcagattttaggatacttaacccttcaatttccctatataatttccaattcattttagccattttgaactttttactagaaatagagttttcaacttttctatacttcgataaaacctcatctaagccataggcataatgaccttgtcttaatatttttaaccatgttgcagtatcttggcgggtcctaatgttaggcatttgtactttccctagcttctcaatatccaacatcaccgttaaacaaccaattattgtattttttaataatccattataattaattttttctggcacatgtacaattttatcagtaagggtaccatcttgattcataatttgataacccgtaaacgaaaaagctacatcattattctgcataaaagtcaattgtttttctaatttttcgggtagccatagatcatcgctatctaaaaaagctacatacttccctcttgcattattaatgcccgtgtttctcgcaattgctgctccacaatttttctgcaattcaattaatcgtatacgattatctttcttaatctcttcttttatcaattcacaagtattatcttttgaaacatcatctataataatcatttcccaatttgtataagtttgagattggacagattggattgtttctttaataaaagaacttgcattatatgatgggataataattgacacaagtgattgattccctatttcaatctcacttagatttatttccatttcaatactactccttcagattttctttgatattttcatcaaaattttaacagctctttaaaacttttgatgaatgagcgaattggtttttcagttaaatgaaatttttttacaaagaaaattgttagcatacatatagctggaatagttcctctcatccttttaaataatggtccttttcctgtaaaagtattagaatcaattagtttattttctgatgttttctttttatgaaaaacaataatttgattaacataagctatactatatttctgtttcaataaatctgcgagcaagatattttcttcaccagatggatattttgccccaagaccaaatctctcatcaaacttcaaatctccaatatcaattttatttaaattaataaagaactctattgatgaaatttttaaaaccccgcgaatacctaatttttctataggagcttgtggatattctttataatattgttgaatttcggggtcaaatatctgaaaacttagcgcgtcgatattcctatatttaaatccttcaacaaccgtttcaaatgcgtttttaggataccagcagtcatcatcagagaacgtaacaataccattatccacatattctaaacctttatttcttgcatgagataacccttttttgcttaatataacatgatggtaattaaaattgtatttcattaataaactgctaattctatcatgattttcttgagacacaataataactttaatattattaatagtttgctcttctaaactattaaataagcgtttaatatactcaattctatttcctaacgtgggtactataacattaactaaatattcatttcccaattttctcaccatacttttatcacttaattaataacgctccataattctttatattgctgacgtatatcctgccaagtattattttgagctattttcttagcactgatacttaaatcctctttaatattaggattatctaatattaaattaatcctttcagacagctcctcgtcattatttataataaagtgttctaatcttgtatttttaagcaaataattcatctgaacatctttacttactataactggtgtaccaacagctaatgcctctaatggtgctaagccaaaagtttcatataagctattttggatataaagatttgaataataataagcacttatcaattcactttgatttaaattacctatatatataacctttttaggatccatcatattcattaccttgtcatgaacatttccctttggcccagcgattactaagataaaatcatccctttttatatcattcacaactttaactaattgttcaattcctttgtacttaaaagttccgcaagcagtaaatataatcttttttcttttttctaaaggaataagttcgttaaaaatatttttgtctggctttatagtcagaaatttttcggaaacgccatttggaataactttcaatttcttttttggtattttataatcacttataatcatttcctttaacccttctgacacgcatataataccatctgcaagcttcaaagtaataaattccgccattttacaagaaattctcagattagagaagtgcaaattttcccgcgatactaagccatttgcggtataaagaatattctttcttaatattttccctattataactaacaatgcatttgatcgtgtaaaaccaaatatatgcaaattacttacatctctagaaaatatcccttttatacatgctcttatatcccttcctaaaacaattatatcctcattatctatatcattaacaatactattgaacaccttttgtggaccagacatttctttttctatgttctctactttaacccctattactaaagttttttgcaacaggatctcctccgttctctcttttaattaaatcactacctaactttattgtagtaaatataaagaaaaaccataaaaagtttagataattatttcttaataaagagaattctgtaccctgatggaataaaatagctactattattgcaatatttccagaatacatgagccactgatttttatactctaagttgttcttgtatttttgaaactgttgaattaaaatccctaatgtacaacagacaaaaaatagaaataatcctaaaccgataacccctatctcagctgtaatacctaaatatagactatgtgcatgatttactccaacattcatttctcttaaaaactcttgactagaattgaaccctatccccaaaaagaaatggtttgaaataacatcggctaataaatcccatgcttttcctcttcctgccaaatctaagcttaatcgctggttacttccctgtaataaaagggctattattcctcctgcaaaaacacttagaatcaaagatattctcatgaatttccaaatgttttttcttaaacggttcattcccctactattatttaaccaaaagaacagaaataagaagattccaaatgccaatatccctgttcttgaatatgttaaaaacaaggcataacattgaattaaaaatgatattataaaatagaaagtttttattgactgtcttaaaaacaaaatcagagtggtcgctaatgatattaatagtatgtatgataatatgttaggatttcctgtaatagatgaaaatctcagtgtcgctcctgaataataaactgcctgttctattcttataggacctaaggtaatataatttagtgaatattcgtcattaaaccacatcattaatccaaaaattttaataaatatcattaagatagctaaaaataaacctactaacatttgaattttataactagcaatcaatgttttttcaatcattcgatctacattaacaatgtatgccattgcgaaaataggaccaaaaattataaatgttctccataaagtttcaaattgtatttcactccaaaaacttgaaatagcacagtaaagacctaagacatataaacagcccattgattgcaaatattctttagtaaaattagcatttttactatttaaaaaattaaataaccacagcacaaaaataattaaaaaattagcataataactatatggtgcttttattaatggttgcatgctatttactaccggcacatataaaatgaatagtgaaattaacattatgaaaatagagttataaacataagaattcttactatccatcttttgaagtacaaaacttttgtctttcatattttaacctctacttttaataaatttccctagtctgtattttaagacctttggtaaacggcttattaatattaaaattaccttaggatttaaatatatatttttcactatacccttaatatctttttcttttattttttcaatgaagctataatataaatttagatttgagagtcttaccatcctaccttgcaattgattaattaattttttattcccttgaaatttttcatgttttaacagttccctatttgcttgtattaactgttggattctctttgtcttttgtcttgtaagagaatctcccctctgcctataaaagtataacggtttattataaaaataacatttattagactcgcatagtacctcaagataaaaaacataatcttccccaaatatcaattgatcattaaatcttatattttttttctccaatagatttctttttattatcggttgcattcctaaatctaactctactaataactctggggtaatattaaggctagattcaagcttttctttgtaattttgacattgtgttgcatacggacttacatgcccatcatatattaggaaaatatcatcaaatatcatgtcagcttctttaattctagcaaaattaagcaactcttttattctttcttgatcccaccagtcatctccatctaaaaaagctatccaagtaccttttgctttagaaatcccaaagtttctcgaataagccggaccttggttagaaccattttcatatagctttatccgctcatcttgtaaagattgaatgatttcaactgttttatcccgtgatccatcatcaattactataacctctaattgcttaaaactctgattaagtactgaacttaacgcttcctctatatattcttctacattataagtgggaattattatagatatctcaggaacagacatttatagcctcctctacataatagatttctttttttgaatcatattttttattaaatctttttctgatagaataacaattaaaacaatgagataacttattactaatgagataaatatattaatatttcctagaaataatttatttatgacatacaaaaaaattaaacttaataaacttttagaactacccctaaacacggtaaatattccctgcttattaaaaattattaaacccagtaatagtacaatctctattaaaacagctgcgattgctgctcctaaactaccgtataactttccaaaatacgagtacgcaaaaatacctgtcccaaaactaattaataatgcaatagatctatatttttgcaaacctttagttgttaaactatccgctaaaggaaagttaattgattgaataaaaacaataatagataaaatagaaagcgtttcagcaattcctatccagttttcccctaacagaaaaactgaaatttcttctggaaatagtattatgggtagaaccataattaaagacaataaagtcattaacttgatttcgataactattacctctccatgtttttttagctcacttctatcaataagcttaaacaaaactggataaaaagctgctgctacaatacctggaatttgatatagaacagaggggatacgtaatgcagcgttaaaatagccaacctgttctaaactagataccttttctaaagcaataggtcccattaaaggcataagtattgttaaaaaagcagttaacgtaaaagcacttaacccatttaaaatagaattatctaatcctttatgcaatttaattttattaatgacaaaagagatacttataataccccctaaaatactacatagcccataagttaaggctaccattaaaagactatatccaaaataaactccaataagaagacctatgacagaaattaagcctgccatgattcgaataattgcagtatatttcattttttcgataatttgataatataccgctcctacattttgtagtgctgcaccaaatattgtagggattaccatcaagaaaattacctgtttcatttctttctgactatacataaaatttactagaataaatacaattacagaggagaatatacaaatgaataatcttgttaccaaatagctatttaaaagtttagatatatctttatcagctttggtaccctccctaataaatgtatgagttaatcctagatctgtcattgaacttgcaaaagtggaaaatactaatgcaatacttaaaataccatattgttctgccccaagatacctagctatcacaattgctgaaatggcggttaacattcgtaccatcacatttcctacaaataaaaatgaagcatttttaagaattaattgtaagttcatactaataccatcctgtatttataagatacattatctagctccgtcacctgtgcatactaccttaatagtctttaatataattttaaaatccaacaataaactggagttgttaatgtaatatatatctagcctcaacttttctctcggtgtaatttcataaccaccatttacttgcgcccatcctgtcagtcctggttttacctctagtctctttttaaaacctggaatttcacgctcaaatttctcagtaaacataggtctttccggccttggtcctacaagagacatttcaccttttaaaatattaaataattgcggtagctcatcaatcctcgtcttacgaataaataatcctatctttgtaatacgtggatcattcttctctgcccattttgcaccatttttttctgcatcatttctcatagaacgtaatttaataacattaaacttcctaccattcatacccaatctttcttgtaaatagaaaggcgaccctggggattctaaaataattagtaaactaaatatcaacataacaggtgccaatataatcaagcctagtaaagcgaatataacatctaatatatacttactccctaaatataacttggattgtctattttcgacttgaacgatttgatcatctgatgtaacttgatattctctcgctatattttcaccagtcttcatattccctctcccttataatcttattcattgatttctttatgtactaaatcattcatatattttattaattgcttttttaattccttatgctgtaatgctacctcaattgtcgtcttaataaaccccaatttctcaccaacatcataacgctttccttcaaaatcatatgcaaatacccgttgaatttcatttaatcgttgaattgcatctgtcaactgaatttccccaccagcacctgtttgttgatcttcaaggagcataaagatttctggtgttaatacgtaacgtcccataattgctaaatttgatggcgcagttccttgagctggcttttcaacaaattggcgtacttgataacggcgatcattcctttcaactggatcaataataccgtaacgatgtgtttcattttctggtactgtttgtacaccgataacagatgattgtgtaccttcatattgatccattaattgacgtaaacatggcgtttctgcttgcacaatatcatcaccaagtaatactgcaaatggctcatttccaataaatttacgggcgcaccacactgcgtgtcctagaccctttggttctttttgtcttatgtaatgaatattaatttttgatgaagcttgtactttctcaagcatttcatacttccctttttctaagagattttgctctaattcaaaggaatgatcaaaatgatcttcaatcgcacgtttaccttttccggtaacaataataatatcttcaattcctgattctatcgcttcttctactatgtattgaattgttggtttatcaacaattggtaacatttctttcggcattgcctttgttgccggtaaaaaccttgtccccagtcccgcagctggaataattgcttttcttacttttttcaaatctagtacccccaaacatattattatatccacatgtaacaataacaaaaaccctacttatagggtcgtctttacaactccataagtagagtttctaacataaataaattatgggcatccaacccatcctcacgtcatactcccgacgacaagcgtctaaggtaggttcgaaataaaaatttctacccacagcacgaccgagtgcctccgttgataacggttaggagacatcaccaattctttatttaaaaaataccgaacaattttttacgacgaatttgttctggatcttctttataaattgccttcccgctaattaataagtacggattttctttcaaatcactcataacactcattccaaattctttctcaattagttcatagctttccgctaaatgaaatcctcttgatgtcgtgttatgtgcatctgatgcgatcatatgtgttaaattatgttctacaagctgtagtgagaattttttaattttttttccaaatttcccaagtaaactacctgctgtcacttgtgttaatgcacctttatttacaagattatataacttatctggccgctcgattaactcggcattacgttccggatgaacgataattggaatcattccttttacgcgcaattcatatagtagttgttctgcataacgaggtacgtgatttgatgggaattcaatgaatatatatttatttgtttcatttaaagtaacgattttaccagcttcatagtcttctaataaatcgccatataatctgacctcttgcccaggtaaaatggtaagtggcatattatgttgttgtagttcatcatttagttgttttacatgatgaataattgaggtacgttcatttacatattttccattttgatggtgtggcgttgcgacaatggtatgtattccttctgaaacggcttgttgtgccattgctaaactatctgttactgtctgtgcaccgtcatcgatccccggtaaaatgtgacaatgtaaatctatcatttgtttcatcctccctctctcctataaagatcttttttcccttgaatatgagatatcgctcatattcaagggaaaaaaggagatatgtttttaccatatctcactttaaaattagtttgcaccgtagtagtagtataggccttgttcacgttcacggtcgtttagaacaacgcccaacaatttacctttagccgattctaacaatccttttgcttttaccgctgtttctttctctgtcgattcactacgaacaacaagaatagaagcatcacatacatttgccataatttgcgcatctgttacagctaaaataggcggcatatcaaaaataactaagtcgtacatgctgtatgcttgtccaagaagttctttcattgattttgaacctaacaattcagctgggtttggggggattggaccacaagctaaaaagtgtagattatcaactagtgttgtttgcacacatttctctaaacgttcactatgtgttaatacattcgttagtccaaaaatattgtctacttggaacatttgatgcattgctggtttacgcatatctgcatcaattaataatactttttttccttgttgagcaaacacaacagccatattcgctgtcgttgttgttttcccttcacttggatttgcagacgtgaccattaatgaatgtaaattcgtatcaacagctgcaaattcaatattcgttcgaatattacgatattgttctgaaattggtgatttcggttgttgatgagcaattaattgacggcgttgacgatgattctttttctttttaaataatttaagagccaattgtttgtcccctcacttttcttgatgatggagcgtgtgatttcacgttcattgtttcttcatccatacgagctacaattcctaatactggtaagccaagtaagttttccacatcttcttcttttttcactgtgttatctaagtattctagtaagaatgcaagaccaactgaagccattaaaccaacaacgaaagcaattgccacatttaacattggacgcggtttaattggagattgattttctgcaacttctgctttagataatactgttacgttatcaacgttcataatttttgcaacttcacctttaaatacatctgcagttgcattcgcaatatcgcgagctaatttcggatctttatcctcagctgttacagagattacttgtgaatccttttcattcgcaacattaatctttcctgttagcacttgagatgtcatatttaaatttaatttttcattcacttgttctaagattactggacttttaatgataaccttatatgtattcgttaattgaatattcgtttgaatttcaccagcttggaacattgcaccctcttgcttcttctgattcacaagaatttgcgtcgaagattgatagattggtgtcataaagaagaagctaatgatagcacttacaatagctgcaccaaaggcgattacgaggatcattgctaaacgtttttttaagatatgaaataactcttttaaactaattgtttcttccataggttcctccaactttctaaaatttacacataggaaaaattataacatataaatcttacattttttatttttaataatttagttctatatttgttcacaagaaacaagtataatcttacaaaataatcttaaatatgacaacacattccaatgattctccaaattatttatcatatcatgctttttatgctatgtaacttgagaaataaatttaagaatacaaaaaaagccaacaagtatttcttgttggcctgtttctattttagtaataaccatactgctctttttcttctcttttatcattcaaaacgactccaagtattttgcctgatgctttatctaatatttgtttcgcttttacgattttatctttttccgtcttttcacttcgtacaacgagtacgattccatcacatttgttcgctagtatttgtgcatccgtaaccgcaagcacaggtggtgtgtcgattaatataatatcaaacatgttatatgcttctagcaatgcctcgtccattgcccggctccctaatagttctgctgggtttggcgggattggacctgctgccattaagtatacgttctctatatctgttttttgaatgcattgcataagttttgcttgtcctgataataagttcgttaatccatttgaactatgaatggcaaataagttttgtatcgtcggcttccgcaagtcagctccaattaataaaactttctttccttgttgtccgaaaacaactgctaagtttgagattgtcgttgttttcccatcacctggatctgccgaagtaacaataatagaacgaacatgattatctacagatgtaaactcaatgtttgtacgaatgttacggtattgttctgtaatacgcgatttaggctctttatgtgtaattaattgtcgtaatggttttcttttctttctcccgaacatattcataatctccttttgtgaaatgcgacatttcccttttctctctcttatgctcgatttcatacgtctaattaatatttttgctgatttccccatatctcatcataatcaataacattctaatttgtcttacttaagtaccttaacaatatgacaatgcccttatttctttattacctttatcacttatcctgttttctagataaatactaaagtaagtatatggtaatttccatctatttacaagttattttctgattagtttgtatattattgtttcatcgttatatagcagaaattaaaaaatccccttgtcttttcacaaggagatttttcagtactatctattcttttttatcaccaatcgcaaatgtaatttctgcctcacatgcaacttcaccatctactgttgcgattgcttttccttttccaattgggccgcgtacgcgtgtcatttctacttctagacgaagctgatcacctgggcgtacttgttttttgaaacggcaattgtcgatacctgcaaagaaagcaagtcttccgcggttttcttctttctttaatactgcaactgctcctacttgcgctaatgcttctacaataagtacaccaggcataactgcatagtcagggaagtgtccgttaaagaattcttcgtttgcggatacatttttaatcccaaccgctctttttccttcatctacttctaatattttatcaacaagtaaaaatggatagcggtgaggaatgatttctttaatttgttctatatttagcatgtaacaatcgccccttttgtaatattggtcttaccacttggacatattgctattatcccattttgtttattgtttgtcattacaaagtaacattttatatttagtacaacttcctaaaaaaaatgcacacactctattccattaaaatagttgcacatttttgcaactgacacggaggtggaaaagagtgtatgcccaaattagggaaaggcaatatgtattgaaacattatttgccttaatgtcgtattcgactcattatattataaacgttttcaattaaggaaatattaaatttaaccatatatatgaatattttacctgtttccttcatatttctctattttccttccattttcgcaaaaaaacaaaataaaaaaatataaaaacaaaaaagaactaaggcattagccttagttctttcaaattatctcaaagcacgctttggtaatctgtcgatattctctaacataatacctgtaccaaccgcaacgcagtgcattgggttttcagcaattaatactggtacttttagttcttctgctagaagcatgtcgataccgtgtagtaaagctccaccgcctgttagaataacaccgcggtcgatgatatctgcagataattctggtggtgtgcgctctaatacaccttttgcagcttgtacaataacagctgcattttcttttaatgcttctgtaatttcttcagagcatactgtaattgtacgtggtaagcctgttaccatgtcacgtccgcgaatttcaagttcttcgctacgtgcacctgggaatactgtaccaactttaattttaatatcttctgaagtacgttctccgattaatagcttatacttacgtttaatatagtttaagatctccatatcaaacttatcgccagccattttgatagaggaagaggtaacaatatcacccatagatagtacagcgatatctgttgtacctccaccaatatcaacaaccatgttaccgcttggttggaagatttccataccagcaccaactgcggctacttttggttcttcttctaaaaatactgttttaccacctgaacgttcagcagcttcacgaattgctttttgttctactgatgtaatatttgttggacaacaaattaaaatacgaggttttgaaaagaagctctttacgtccaatttgttaatgaaatactttaacattgcttctgtaatttcaaagtctgcgattacaccatctttaagtggacgaattgctacaatattaccaggcgtacgtcccaccatgcttctcgcttcttcacctactgctaatactttaccactattacgatcaattgccacaacagatggctcatttaatacaatacccttacctttaacatgaattaatacgttagccgtacctaggtcaattccgatatctcgcgcaaacattcccgttttttcctcctcgatattcaaaatcaggttacacccgaattcttttcacctaatttctgattttatcataaatttaacagaaacgtaatattcgcaaaaagaattcttctgaaaaatattaccgaatgtgaacggaatgtttgctactgtaacattattgacgtacaggcttctctacatcttcttttctatacttttgttttgttgcttctccccctcttaaatgacgaatagacttatgataatcaagaatttctttcacttcatttgcgagctctggattaatttctggtagacgttctgttaaatctttatggactgtactctttgataccccaaattcctttgcaatgacacgcactgtctttcttgtctccacgatatacttaccaatcttgatagttctctctttgatgtaatcgtgcacaccactcgcctccctaatttggatgtgagaagggtgaaatgagcctcgctgcatacgactaagaagtaagtgtgagtgctgtttgtaagcgttaaacattcttggatttataatgaaatgattcacgatttctcacctcaaacactctctttgctttggtttataccattgtattgcccgcactactgatatatgctacatgttcactatttttgcggactaagttaagaaaaattacgtttttttgtgagaaatacgttaaaactgactattatagcgaaaaaaaatgacaccttatatataaggtgtcattcttctcgttccaattcttcttctaacaattgatggtggggaacctctttcttaccggcaatgtaataatataaagtgaataaaacaaacaataaaataatagcagtcgacagaacaaacaaaaatgacacagtatcccctcccttttgtaatatatattcgagaatctcgtcatttttccttgttattgcaacttttttctcgaaattgagtatttttatataaaaataaaaaaatcagctcccctagtgggaactgattttttcacttcattattcttgtgaagaagaatcgttagatgattctgtagaaccatttgttgatttttcttctttcttcggttcttcttttttgtcactagttgaaccgcttgttgatttctcttctttttgagacttgtcttctgttttactttcaggtttcgtgctcgttgacttctcttctttttgagatttgtcatcagcttttttaccagaagcattcgtagcctttgcagcacctgcatcagctttaatttctgttactgatttatttaagtaacgttcagggttcacagccacattgtctttacgtacttcaaagtgaacgtgagaacctgcctctttattcattgcacttagaccggatgttcctaatacttcaccttgtgcaactcttgcacctttttctactttcacactgcctaagctttgataagataccgctacaccatttccactatcaactgttacaacataaccaagaagtgaatctttttcagctttcgttactgtaccacttaaagcagcagcaacattgaattcttttccattcttcgcagcaatgtcaattcctttattcggggaatatgtgttgttataaaagacaagtgctttttcttgttccgcctcagttgctgcatcttcatagaatttcttctgtacgactacttccgcattcgcggcagctggcattttcactacttctgaagattttgttactggtactgctggatcttccgattgtgtatacggtgttgcttgatcgtggtttggagtcttcttcggattagctccttggaaccatagcgcaaccattaagattaccgctgcacaagcaatgtatagtgccggaaacacccatcttttttgaaataaatgtactaccttttgcgactttttattatttcttcctcgcattccatcatcacctcagcaatcattttgaacaatattcacgtatcctatacaacgtataactaattacttttcgacaaaatctgtaaaaatatgtataagaattgtaaaatttccgaggaaatgatagaaaaaagaaaaaactgagcacttttggctcagtttttaatctaattgtttctttttatatacgattaaacatacaaagagcgatataataagccaaactgcaacatttaatacatgcccactaatactaccaaatcccgccccacctactaaactgttaagtgctttcacaatatgagatgttggaagatatccaatcatcgtcttaattactttattttcaaccattggctcaaactgtacagccaaatacatcgtcattaatatcggcattccaattattgatgtttgtggtacagatgcagctaacaatccaatcattgttccaatcacaataaataaaattgttccacataagaaaataaatcctagcaataatagatttccactgaattgatccaaaataaataagttcacaatacaaatgcccaatgtcaaacatactgttaatatactttttccaagtagaacttcaaccgaagatgccggtgatagcattaatacacgcaatgtatgtttttctttttcttctgcaattaccatagattgaacaaaccctgcgacaaataggaaggccgttatagtagtaatgcctaacatttcctttcccactccaaatctgctaaacaaaaatgaaagtataattggtaaaaatgccattaacaacacttgtgaatttgtcttaaaatcttgtacttcttttctaaaaatagctgatacacgtctcattgaaaatgtcattataatcccctcccagtaacttcaataaagatatcgcctaaagttggttcgtgtgaatgaatggatagtaattctcctttgttcatccattctgaaatacgttttgcacctaattcatctttttgtaccgtttctttcttcttatcctttaacacgacttgtatttgatctttcgcgtattgtaagcgaaggttctccggtgtatcaagtgctacaatctctccgccacacaggaaggcaatgcggttacaaagcgtttctgcttcgtccatgttgtgagtcgttaagaaaatcgtcgttccttctttatttaagtcttttaagattttatgaatgttttgtacgtttactggatcaagtgcagatgttggttcgtctaagaagaggatatctggtttatgaaggattgctcttgctagtgtgacgcgttgcttcattccctttgataatttttttactggtgtttttttatcatctaataaattcacttgtgctagtacttcatcgattcgttcttttttgcaatcgtataagtcacaaaataatagtaagttatcataaatgctaagtctttcatataagccgctgttatctgttaaaataccaattcgtttgtaatcgatgctacttggtcctgtaatatctttccctaatactcttaccgttccaacactatgaagcaattgagaagttaaaatttttactgttgtcgtcttaccagatccactcggtccaaggaatccgaatatctctccttgcttcacctcaatatttacatttcgaagtgccgtttttccactgaaacttttcattacatctttcatttcaattgccaatgtcatttcttcatcccctttgtttttcttctttatagatgaaagtcgctttagcgcttttcgttcgtttgtttcgcttttcttgactcaatcatatgaaaaacaaagggtaggcgcattaaaataccggtaaaaggagtatttttaccggtgaatgaatcgcatattgagcttattggagcacttttatagtccaataacaccttttaattcatccattcgtccttttgaaagcgggattgaactttttctttcgtcgtctaaaattaagctaaaactgttacgagtccaagtaatcacttctcgcactctttgtaaattcacaaggtacgagcgatgacatctaaagaaaccaaaacctgttaaccttgcttctagttcgcttaatgttaatgcacatacgaaatctccttcacgaacgtgaatatgtgttactccgttttgtgtttcaatgaaatggatttccatcggatcaagtaaaatgattttatcgttcactttcgcaggtattctttctaacttcatttgcggaattatttgaacgaccttctcttcatcgacttcttctgcttcctcttgttcaatttctacttttttcacaccatcgttgtttaatatgtatacatcctctgttaacgaaagggcatccgatagaaaagatgacgtaataaaaattgcctttccttgttctttcattttcataattgcttttcgaataataaccgtactctctatatctacattttgctccggttcttccaaaatgattaaatccggattatgaatcatcattcgtccaatatgaagacgacgcttctctgaaaatgatagtttttctattttaacgtttagcttatctaggagaccaacagactgcacaacttcttttatacttatctttgattcataaagccctattaaaaacttaaagtattccttcaccttcaaacgatcatatgcttcatccttcaaaaaacaaaagcctatgcgggaataatttttctttccaattgcttccccttcaaacagtacgttgccagttgaagcttcttcttgaccaataataatgcggtgtaacactttagctgtatgattattgcattgcaaaacaatacattgtcctttttcaacctttagctcaatttccggtaactggttcgccttccctaactgtttcaactccagtagcgccatttcgtctcccccaaatgtctttttatcctattatatcaaacaattaatggaaaattattctattttacataaaaaaaatagacgccagagttctgacacctatttcttcaccatcaattttccttcataatcattcatcgtctttatttcaacgcctttatagtaatgagcgacgatatctgtatatttctttccttccgctgccatgccgttcgccccgtattgactcataccaacgccgtgaccgaagcctttcgtcgtaacgatgattttatctccttgttgtttccacgtaaaatcagaagaacgtaaatctaacttttcacgaacttcttttcctgttaatgtttttccttgaaaagctacatcctttacgcgctttccttccgtaaggtctttaatatttccaaccttcccgtctgctaacactttcacaccgagacgtttttgaaaatcagctactgtaaatgtttgctcactcgtaaactttggagaggcttgatcccacggactatctacacttttcaagtacggataatcatttccccaatagtcagctgcattttctgttcggccattactcgttgaaaagaaggatgctgaaattggttttccatcatacgttaaaacttgtcctgctgttttcgaaacggcttcttcgattttcttcaaattattttcgtagttattgccccattgcttcttcaattcatctttgcttttgtacacttgatctttcaccgtatctgtcacgtccgcattatttttctttcctccgcttaacatacgttgtactacaaatgttctcgctgctaatgcctgcgcctttagtgcctctatttcaaaactggcattcatctcagaagctactacacctgtcacatactcctccactggtaatgtttctaccttcttctgtttttcgcgatatacagcaacttgaacagctgtatctacttttcctggagctggtatgctttctatcgctggaggagttttagaggccgtttcttcccctacttttgctttcgcaaatggaataacaagggctgcaggtacaatgataacgagcgctattaagagcgctactgtaataaaaagtggctttgaaaatttcatcctattttcccccaatataaaagctttactccattcattcttatggaacaactctttcttttagaacatacttaaggggaagagtataaaacagaaattttctaaatatttttactggtacgtgcataagtatagaatttattgactataacagtaataacccaaaaaaatagcccctatgtcaaaagacatagagactatttcaattaagcgtgaagatcagaaacttcttgttctttcacttcttctactttttcgtttacacgttcaatagttgcacctaatgcagctaatttcttatggaagtttacatagccacggtcaagatgttttaactcagttacacgagtataaccttctgatactaaaccagctaagattaatgcagctgcagcacgtaagtcagttgctgctacttcagcaccttgtaagctgtttggaccgttcataataacagaacgaccttcaattttaatatcagcattcatacgacggaattcttcaacgtgcataaagcggttttcgaataccgtttctgtaatcatgcttgttccatcagcttgtagtaataatgccatcatttgtgattgcatgtctgttgggaaacctgggtgaggcatagttttaatgtcaaccgcttttaacttatctgggccgataacacgtacaccttcgttttcctcaataattttaacacccatttcttccatttttgctgtaattgagcgtaaatgttcaggtacagcattttcaattaagatgtctccaccagtaattgctgctgcaaccatgaatgttcccgcttcaatacggtcaggaataatagaatggtttgcaccatataatttatcaacgccttcgatacgaatcgttccagttccagctccgcgtactttcgctcccatcgcatttaagaagttagctaagtcaacgatttctggttctttcgctgcgttttcaagaattgttgtcccttttgctaatgtagctgcagacataatgttttctgtcgcgcctacgcttgggaagtctaagtagattttagctccttttagttctccctcaacatatgcctcaacaaaaccgttaccaacctgtactttcgctcccattgcttcgaagccttttaaatgttgatcaattggacgtgaaccaattgcacatccaccaggaagtgcaatacgagcacgaccgttacgtgctaataatggtcccattacttgaacagatgcacgcattttacgtacatattcaaatggtgcttcaatgtttagttctttagaagaatcgattgttacttgattattttcaaatacgacttcagcatttaaatgacgtaatacctcattaattgtgtatacatcagacaaaactggtacttcagatagtacattctttccatcactcgctaatagggctgcagcgattataggtaatacagcattttttgcgccctcaacacgcactgtgccgtttaaccgctttccgccacggacgatgatcttttccaaattattcccctccgtgtccttttttcagtatctattcactcaatactcagaagttatgatcggtgtgccaaccacaattgtatctttgttgtctgtagaacgtattgctatttgcacatttattttctctctatttgttgaaagagcgtcatcccactttttattgtatgcggagactgacacaaatgctctttcttctacttgttcgatcgctcttgctgaaagatctttcaaaacctgattggttttattttgcaaaacaccttcaatcttatcattcagtacaccttgaacacaagtgtaaattataggtttttcactaaaaattttattcatgttttgaacatacttcgggtcccatttcgccccacttacttcaaagataatgaaagtgttttctttagtattttctttactccaagttactactactcgttcttcataagaagaaagctttttataggatgtagctttatatccatctggagattgctctacttcccacttttgaatatttgccttttccttcacatcgtttaacaacttttgaaacgtatgtatgttagaaattgtttttgtttctctcgctaaccatgaccatttttctactttagcatcatttttctctaaagccttgatcatgctctccattttctgttcatcgcttatcggtttcatctctctatatccaaccaaaaataaaacaacactaagtgcaacaataagaatggctttaagcttcaatttcatcccctcctatccccattgttaacggagatttgaggttctatacacttactttactaaatacgttaaactcttcgaatagcctaaataatcaaggaaaaagttacttacagatgtcccaattgcaattgtaattaagatgagtaatactcgcgtctgcagcacttttccggacttcattaaacgctcaatgtgaatgccttgtaaggcccaccacgtaatggtaataaacaataaatgcgaaacaatggcaatcagtgcttgttgccctaaaagttgtgccaaaaaatcgacccctttttactcagctactacttatgaaagaatataaaaacgataccataataagtaggagctacactttttcaaatgcacatagacatcttacattttacatcgtgattttctttccaaaaacgtatatctacattacaagttaacacaaaataaaaagcgcagagtactgactccacaccttttattttcactattgtaccacgttccctaagaagaagaaatctttcattaatggaaaatattcataaaagaaattgtacccaatcatcggcataatccctagtattacaatcgaaattgcacaaagactcataacaacctttatatttaacggtaaccgtatcctctcttctgtctctcctgtgcggaaaaacatttgttgtaaaatacggaaataatatacgaatgaaacaactgtcgtacccatcataatcgaagctagtacgtaatgtgctggatctacatgaagcgcgcctaaaaagatattaatctttccgatgaagccagccgttcctggtatcccagccaacgataaaataaaaattgtcatcataatcgctgcaaatggcgaccttttatataaacctgtgaaaatcgttatattttcctcatcattttgtaagattaagccgtggatgatagcaaatgcacctatattcataagcatgtatgccagcatataaaaccacatgctatccatcgtaaatggtgataatgcgacaagtggaacgagtaaataccctgcatgagcaatgcccgaataagcaaataaacgctttatattgtattgttttaacgcgactacattcccaacaatcatcgtaatacttgctagcaccgcaatatatatactcatatgcccatataaagattgcatatctccttgtattaatacacttgcaaaaaccataaggaacaaacgaataatgagtaggaaaccagcaattttagaaatcgttccaagaaaagcagtaactggtgtagctgctccttcatacacatcaggtgcccacatatgaaacggcactgtggcaattttaaatgagagaccgactagcaataaaagaaatgcgagagctaacaataactgaataccactagcgagttccccagtgagtaccttttgcatatctacaatgttagttgaacctgtaataccgtataaataactcattccgaagagcgtaatcgccgttccaattcctccgctaatgacgtatttcattgccgcttcatttgatgcacggctcttttttcgtattcctactaaaatataagaagaaagtgaaagtaactccaaaccaacgaaaagggtaatgaaatcaacactagaagccatgaacatcgcaccaagaagtgccattaaaaataagtaataatattcacccttatcttcaattggattcttcttatcatcgctcattgcggtgcataaaataagagctgaggcacctaatagcaatgttttaaacccttttgaaaatccatctaacacaaacgatccgtttaaaatatctccagctagttcgctatatagcgtaattaatgacacgattgctaatacgatagcagcaatcgcaccaagagctacatatctatgattcagcttaaaaaacaaatcacatatggaaagaaggatggcggcgccgagaataataaattctggcaccattagatgccacgataagctaagtaacgtattcatatccatcctacttcacccccaatgttttcaatgtattttgaagcggatcccctagtaactctggcataactccaattgcaataatacaaaagataagtagtaaaacagggacatactcccatccgtgtatatcagattttgcttcccactctttctttccaaatgtcacttgaagtgtcgcccttaatacgtatacagcggttaaaatgatgccaatcacaccgactgcagcaatgacgggctctccttgaaataaaccgagaaaggcaagaaattcactaacaaacccagacatccctggtaatccaagcgatgccattcctcctgctaaaaagaatccgctaagtatcggtacacttttcgcaagtccgcctagcaccgtaatatccgaagttccaaatcgttgttctataacacccagtaggaagaagagcaaggctgcaattaaaccatgtgatacaacttggaataacgctccttgtgtaccaggtgcattaagtgacgcaagtcccattaacacaattcccatatgcgaaatactagagtaagccagtactttcctaaagtccgtttggatgagcgctaaaaaggcaccgtataataaattaattacgcctaatatcgcaattagtgttgcaacatcgtgaaaatattccgggaatagccctttcccgaagcgaataataccgtacgctccaatcttcagcaaaacacccgcatgaagcataactacagctggatgcgcttctatgtgtacattgaccatccagcggtgcaacggaaaaacaggtagtttaattgcaaaagcaatcattatggcaataaatacactaagctgcaaactacttgggatgacgagtgctccctctgcgtttatgcttcttaatatctctttcagctccacaatatttgttgtacctgttttcgcaaacaaaattgagaaaacaatgagcaaaatagctgagccaataccgttatatattaaataactatacgcagccttttcactcgacaattttccccactttccaattaataagaacattggtggcaacgtaatttcaaagaagataaaaaacaacattaagttttgagcagcaaagacgccgagcattcctatttctagcatgagtaacagcatataaaatgcttttaaatttcttttaatagaaaaggctgcaattgctgcaagcgttgctagaagagccgtcagtaccatcatgacaagcgacaaaccatcaataccaagctcgtaataaatagaaaaccaccttttatccaccgctgtaaaatcgccgaacttaatccatttcaccttctcatcaaatagtgacaaattctttccagaagcatatgtacaagcgaggacgatagcaattccaaatggaagtgccgtcccaaataagccaagcgcccgcactgtacgcaattcctttttcggtgttaatacaagcaataaaattcctaaaagcggggaaaaaatgaagaacgttaacaacaaatcattcatcgtaaatcccctcccgtatagagcaaaataatgacgagtacagcgagcgaaaccgccgttacagtaccgtacacttgtacattcccgttttgaagtttcgatccaagattacttgtgcctttaactacacttccaattaaaactgcaattccttcgactacatacacttcaaataagcgaagcacatgagcgattcctttcgtaatagggatcaccgtcatgttgtatagttcatccacataatatttttctttcaaaagattataaagagatgtttccgtacccccagcccaatctctagaaattgatttcttgccatatatgaaatatgcaagagcgattcccgcaaatgaaacgagtgtcgcaacaatcataatccaaactggtccatgcgcttcttcaaccttaaaccctacatctttcgtcaaccaatctccgagaaatgtcccaaaccatggtgtatttatatatcctgccactaccgcaagaacgccgagaacaatcattggatacgtcataacgcgaggcgattcatgcacttcttccttcgtcttcgtttctccagtaaagacaagaaagtataggcggaacatataaaatgctgttaaaaacgccgcaattaccgctaaagtaaataaaacgtaattgccattcatccacgtcgccgctaaaatttcatctttgctgaaaaaaccggaaagcagcggaacaccgctaatggcaagggtacctattaaaaatagcgtaccagttactttcatcttcttctgtaaaccgcccattttattaatgttttgcgtatgcacagcatgaattacacttcctgccgccaaaaataatagtgctttaaaaaaagcgtgtgtcgttaaatggaatataccagctacataaccggcagaacctaacgcgagcatcatatacccgagctggctaactgtagaataagcaagcaccctctttatatctgtttgcacaagaccgatagaggccgcaaagattgcagtgaaagctccaacgattgccactgtctgcatcgccactgtacttgctgaaaatagaggaaacatcgtcgctactaaatatacgccagctgcgaccatcgtcgccgcgtgaataagtgccgaaacgggcgttggcccttccattgcatctggcaaccacgtatgaagcgggaactgacctgattttcccatcgccccgataaaaattaatatcgctgttattgtaatcatgtaaggaggtagatcccctgtataaatcgccctaaatattgcgtcatattcaaaactacctgcgtaccaaaaaattaaaatcatcccgataaataaaccaacatccccaatacgggtcataataaaagccttttttgcagcagccttcgcttcttctttaaagaaataaaaaccgataagtaaaaatgaaccaaggccaactaattcccaaaatatataaagctgtaataaattcgttgatataacaagccctaacatcgcaaatgtaaagagtcctaaatatgcgtaaaaggttggtaatcgttcatcacctttcatataacctttcgaatacacatgtacaagtagactcacaagcgtcacgataaataacattaaagctcctaatgcagtcacttcaaagccgaatgatatatccacatctccagctctaagccacacccacttatgcttcacgcttgcttctgaaaacctttctattaacacaagtaccgcaagtataaaggagagaaagacgaaaaaaatactaagtacgctgcttccttctctaattttcttcccgaatataataagtaacaaaaacgaaacgagtgggaaaagcggtatgagccatgcataatcgatcattgtttccttccccctttttcggtcacaatgctatcctttaagcgtatccatttcatccacctgaactgtcgtacgattgcgatataaagcaattaaaatagcgagtcctaccgccgcttccgctgccgctacagccatcgtaaacagtgagaaaatttgacctgttaaattcggaaataagcctaatttactaaacgccactaagtttaaattggcagcattcagcattaattcgatacaaactaatacgattactgtattccgctttgttaaagctccaaatagaccgatgcaaaacaaaataatcgcaagtgttaaatatgcagaagctggaacgctactcattggaatcctcctctttctcgtcctttttcgcaagtataattgcgccaacgagtgctacaagtaaaataactgaagttagttcaaatggaataatatattttgaatagagaagcgtaccgatttgaagtgtgttgttttcatggagaggtaaacttccttgtgtgctttcatttgcaaaatcaacattattaacagcgaaatacataaccgctccaaatgctacaactgcaaagaagataatccattttcgaagagtaagacgcgattcattttccgcgttatgtttcgttaacataatgccgaaaatcataataattgtgattgcaccagaataaagtaaaatttgtgcaacgcctataaattcggctgataaaagaaaatacaaacctgcaatgctgagaaatgtcagaacgagagctagcatcatgtgcataactttcgttaagttcaacataagaacaccgccgataattgcagacaaggatagtataaagaatgctacaaactcgccattcatgccttattctccttcctgacgttttcgtcgttttcgtcaagccactgcaaatttttaaataagtcatcacgtgaatattccgcgagttcaaagttatttgtcatgacaattgcctctgtcggacaaacttctgtacataaatcacaaagaatacaaatttcaaaattaatatcatacgtgtcgataatttttccttttttcgtaggatccggatgtttctttcctgttaactgaatacagtctgtcggacaaatgttagagcactgattacaaacaatacatttttccggataaaatttttgaattcctcgaaaacggtctggcaacggcaacggttgatttggataatcatacgttaccttcttcttgctcaaattacttaatgtatattttaatcctttaaatagtcctttcatctcttactggcacccccctcatagattagaagaataactccttaatcaatgccgttaagaaaatatttgcaagtgcaatcggcaataatactttccaaccaaactccattaactggtcacctcttatacgcgggaacgtaacgcggaaccaaattaatagaaagactacactgctaaatttcaaagcaaaccatacggcacctgggataaatccaagaaacatgactggattccatccgcctaaaaagagcactgtaattaacgatgccatcccgaagaaatatacgtactctgaaagcatgaaaaacgcccagcgaaaccctgagtattccgtatgatatccagaaacaagttctgactccgcttctggcaaatcgaatggcgttctatttaactctgcaactgctgcgattaagaaaacgacgaagccaattggctgtacgaaaatgtaccaaaccttctcctgcgccgctacaatctcatttaaattcaggctaccagctagcaaaacgataccaattacactcattacgagcggaatctcataagaaatcatttgcgccgccgcacgcatccctcctaaaagggaatatttattattcgatgcccatcccccagttacaacacctatcgtcgtaataccggaaacagcgatataataaagtaacccgactccaatatctgcaaattgaaatttatcagtgaacgggataactgcaagcaccataaatgctggtgcaaatgcaatgacaggtgctaatataaacagcggtttatctgctgctttcggaatactatcttctttcaataatagttttaaaacatcagctaccgtttgcagtaaaccaaatcggcctccaacctggtttgggccaatccgcccttgcataaaccccatcactttccgttctgccaaaattccatatgtaacgaagccaaggactgcaaatagtagaagtaccgctaatccgaaaaaaatgaagaaattcgtccagcttgaaggtgattgtaagagcgtctcaatcattagccatcaacctccccaagtacaatatcaactccacctaaaatcgtaattaaattagcgatgttttcacctttcaataacttcggtaaaatttgcaagttataaaaagatggcctacgaaacttcaaacggtacggctctttctttccgtcactagcgatataacacccaatctctccgcgcggcgattcgatacgtacaaatgcttctcccttaggtgccttaataattttcggtacttttgccagcacagctccatctttcgggaactgctgaaccgcttgctcaacaatctttaaagactcctcgatttcttgcattcggcaaacgtagcgatcccaagcatctcccacgcttccaacaggaatatcaaaatcaaaacgatcataaatcgaatacggctcatctttgcgaagatcccagtttactccagtgcaccgcaaatttgctccgcttaaagaatacgaaatcgcttcttccgcgctatatataccaacgcctttcacacgatttaagaaaatctcattaccgctaacaagatcatgataacctgccagttgctctctcatatacggaacaaactcttccaccttttcaatccaaccatctggcgcatcccacttcacaccaccaactctcatatagttaaaagtaagccgtgccccgcataattcatttaataaatttataatcatctctcgttcacgaaaagcgtacaaaaacgggctaaccgctcctatatcaagaagatttgtcccccaccaaacgagatggctcgcaattcttcctagctccatcgcaagtactcgcaagtattcggcacgctctggaatttcaagccccatcatcgtctctacagcatggcaaatgacgtaattattcgtcatagctgataaatagtccattcgatctgtataagggataatttgcgtatactgtaagctctcagcgatcttttccgtcccgcgatgtaaatacccaataacaggtgtagcttctttaataatttccccgtcaatcttaattacgagcctgaacacaccatgtgtactcggatgctgaggtcctacattcaaaagcatctcttccgtgcggatcatagctacacctccacatcatacggttcatagtcttttctaagcggatatcctacccaatcctctggcattaaaatacgtgttaaattcggatgccctttaaatataatgccgagcaaatcgtatgcttctcgctccggccagtcagcccctttccaaagcgctgtcacagattcgacttgcggcgtttctcggtctagctttaccttcaccgctaccgattgtttcttactatatgaaaacaaatgaacatacacttccatatgtgtcacaaaatccgtcgcatgtagctctgacatataatcaaaagcaagtccctcatggaatcgcagtgactccatcacttcataatatttttcgggatccaccacaagagttggcacatcctttgacagtttattaatgtaggaatctactaatgcaccctctcctaacttctccctaatagcctcaacatactgatttaaatacggctgatttacggacagttcttcctgcttcggctcatcctctttcttaccttcagccccctttgtcttcgctcttgcagccgctgctgctttcgcttttgccgctgcaattgcctttgccttttcatctcccgaatccccatcaccttgcgaggctttctgcttcgccaatgctgccgcttttgccttggctttcgctttttcttcttccgttacttcttctgtcccttctcttttctgcttcgctaacgccgccgcttttgccttggctttcgctttttcttcttccgttacttcttctcatttcaattaatggaaaaccgtagagtttctatccttaagttgatgggcatggggccatcatatcacttgtgaatatgtcgtctcttgttcacattttcctttttatgatgcaaatagctttttctttacgcgaatgtacgcagaacgctcctacgctcttgcaataaaagcaaaaacggattatccaggtggcatgtatttaagtattgatgatccaaagcgctccttacgctatataacaaacaatggagaaaaattaattttgattggcggagagagtcataaaacaggacaaggaataaatacgatgcttcattatgaagcactttattcttttgctgaagcaacttttggaatagacgaagttccttatagatggtcagcacaagatttaatcactctagataagcttccttatatcggacatattaacgaaagaaatccaaatatatttgttgcaactggatatcgcaaatggggcatgacaactggaactgctgccgctcacctactgaaggactccatcctaaaagtccacagtccctataaagaactgtatgcaccatcacgcttccatgcaaatccagatataaaaacgttcctctcccagaacattgatgttgcgaaacatttaattgaaggaaagattgaaaccgcattacgtaagccagaagatctcgaagttggtgaaggatctgtcgtacatgttaacggtaaacgagcaggtgcttataaggacaaagaaggaaaattacatatcgtcgatacaacttgtacacatctcggctgtgaagttgaatggaataatggtgattgtacttgggattgtccttgccatggttctcgtttttcaattgagggagacgttcttgaaggcccagcagatcaaccgttaaaacgcgttgataatgagtaaacaaataaagaagttcaacagaattacggttgaacttctttatttgttataaaacctgttcagataaatttcgacacaggaaggaaaatattaacattaaataaaataatatattcatctacaaattaaaaggggtgaatattatgcaacctttagctccacctcatctagaatctacagaaactatcttttcaagctctattacaaaacttgttgtttttatttgttggctagccattttagctgatggatatgatttaggtatttacggtgccgttctaccaaagctcctagaagacaaaagctgggcgctatcaccagcgcacgctggtacaattgcaagctatgctttatttgggatgtttattggggctattctagttggaacgattacagatctaattgggcgtaaatggacgcttatatgctgtttagcacttttttctatcacaatgggtttagcggctatcgcttcttctcctgagttatttggattatctcgatttataggaggaatcggattaggcggtgttatcccaacggcttcagcacttactgttgaatattcaccaaaaaaaaggcaatcttttatttatgctcttatgtttactggctatcctttaggtatcgtattaggtgctattttgtctatgtttatgttagaagatttcggatggagaattatgtttggtatcggaatgattccactactcctcattcctttcattattcgctatttacctgagtccattcaatttttattatcacgtaatcgccaagaagaagtgaaccaaattcttaatcgttttcaaattgaatttcatgtaaaaaataaaactcatcaagctccatctactatacgaaagaaaaatggattttttactttattctcaaaagaatacataaaagcaacactacttttttggatcacttatataatgggaatgtttttaatatacggtttaaatacttggttaccacagatgatgcgccaggcgggatatcctcttggatctagtctgtcttttctacttatgctaaatattaccgcagctgttggtgcgttattcgctggagcaattgctgatcgtataggcgcaaaaattgttattagcatctcttatcttatggcagccatatgtatcggactattaacaatcaagccatctgttacaatcatttatcttttaattggccttgctggtattggatcggtcggtattactcaaatattaaatgcatatgtaacacaatacttcccatcacatatccgagctacctccttaggctggggactgggacttggccgagttggtgcaattgctggccctattctcgtcggtattattatgacaatacaatatgacttagcatggaatttttacttattctcctttgcaggtcttatcgcagctatatctgttttcttcattcctacaaaataaaaagagcacaaacttacttgtgctctttttcatatgcttcaaacagcatgtctcgaaatagtgtatttaaaatttcaatatcgatccctgatcccttttcaattccttttacatattgcccatagtaatgaatttgttcttctaaaaattgatttagcaccttaattttcaatccaacatctaattcagtacctgcttttttctttattaacaacttttcaatctcatctaatacactacgttctaatggtaattctgtaatcaatcgatcaaattctacaggtggtaaagttgctttctcttctagccacttacaagctaaaataggacgtaatacataaaagtactttttcagctttacattctcaccttgcaaaaattcacgataatttttcgacgccatatgtaaataatgatatatcgttgcttttggatcaaaattcttctcactcatctgttgaagtagttctggaaaattagagtttttcgaataaaaaattggtgatcgaatccactcaagtaaagctgggttcgacttcgcgaatagttgcaacgcctttttaatatcccaaccacttatatctaaatcatcactaattggatattcaattacatctcgtttgtcatgaattgataaataccattctaccggatgtatataaacaaacctaacatcataatcgctatctttcgatggaaacccccaagcacgactccctgattccaccgcaaacaaaattttcacatcattctctttttcaattctttctaactccaactcgattttctctctcatttcataacatctccattttttgattatttccttggaaattcgacaatacactattaattttactacatactaaaaaaactgtcagaaattactgacagcctaataaaacttctattgttgcttttcaattacagtagcagcaattcgttcaaactctttttgaatctcctctttatatgcatctactattgaaaaatccatagcagcaatataaattcgttctaatttatcacgaaccgattttgctttcgctaagaaagacattgcctcattcatttttgctttatactgaatggaaacatcacgaatttccttcgcatatttctcatcagtccctggcgtaacaataagggcatacatatcaataatttcatcaccctcacgacttggaaaatattcatgcggtgcggtgctatcaaaaattgcaaagcctaattctcttacgataaccatatcaagactattcgggtcaaatccgcaatgatatacttcaacttcaaaccctttttcttcagctgccttagctaactttttaagcatcgttgattttccagaacctgggcgcccttttataaaataacgatgtggtaacccttctgttaaattaggaacaaaatcaactgctcctttcggtgtagcagctcctaaaaaacgatgttttacaagcgattttctcccgcttttatctgcaaataatttctggattagctgatcggttagttcatttgctttattaaaatctatattatcaatatatatcttctcccactcatcatgtataagcaatgcctctttaaaacgtgcgtaagcagactgaaaagctttacttgcttctgaaacaaatctttcaatttctaacttctgcttccttaatttatctgagtcccaagcaattcctaaatttatatactcttcaacaactcctggcattttgggctcaattacatgtggtgatgtcccatcaacaattcctacttttaattttgggataattacaccatcaaccgatttattgtcagaagaacaatgtaaaaattcaatatcatatcctttttcaacccattcacgaccgatggcctttattaaagaagatttccccgttcctggaccaccctttaagataaataatctgtctaacccttttaaattctcttcatataaattatgaaatcccctagctgtattaccaccagcataataattcaatacatttcctgtcactgcactcactccttcgcagcattgtatttacataagctacaatatgcgcgtagctttatttgggtgaatacctattttgtattgcacgcaaaaaggaaatgaattacaatttaactatcggaaaattccgatttcaaaattaaatacttctttatcaagagaggcagagggaccggccctttgaagcccagcaacctcagtttatacgaactgaataggtgctaattcctgcaaaatgcattgcattttggaagataaaactcaactagcatgtaaagctcacctttcttgatattgaagggtgagctttttattatttgaaaaacatatattggaggtatgtaaaatgaaagtaattgatttatcgcaaacatttgaaaataatatgtctcaatttcctggaacacctaaaatacaactagaagctgttacaagtgttgaagaatcaggctatcaagttacagattttcattctgtcgttcatgttggcacgcattgtgatgctcctgcgcattttatttcaggcgcaacgaccatcgatcaattacccctaaatcaatttgtaggcgaagcggttcttattgatgtaactcatgtacaagaacgaaaactacctaaagaagtactggacgatgccgatataaaagaaggagatattgttattttccattccaatctatctactaaatggaatacagaggcgtatgagaaagaagctttttatctttctgaagaattagccgaggaactagtacaattaaaagtaaaatctgtcggtttagattttatttctcctgatgaggtaacgacagaaacatcaccaattcatcacatactacttgggaataatatttatttaatcgaaaacttaacaaacttagatgccattcacacgaaacgtttcttcttctcagcagcacctttaaaaattaaagatagcgacggtgcttttgcaagagcatttgctgtaattttttaaacaaactatacaaaaaagcaaagatcatcattgacctttgcttctattttttttatttaaattaagaaagaattgctcaacatgaggacgtaaccaagctaaataatccttctctttcttctttgtacaagctatttcttccccatctaccatttcaacaagttctagttctaacagttgcttcgtgaatgctaacatattcacttcttcggatggatactcttcttttaatttctcctcaatttcccccaataaaaaaccgtcacgcatcattgccaatgcatcaatccaaagtggcggcatttcatatttttctcctgtaattgtgtcttttacagtataattcttttgctcttttcgaaattgaatcgtgtgtaaacatacagtcgaatttaatgttaattccatcataccacctctttcataatatctgcatagaaaaaaggatgcgcgtgcaccccttcttatcttttcataacactactgaaccgttacatgagcaatcaatctcatgtcgatattttccttcattataaacgaagtattttataaaaaaaacccttcttgaaacattttataaaatgtttatatttacacaacaagaacacttttctgaaaaatcttttctcaaatacattaaacggtcggcagaaaaatttctactttcgttcctactcctacactactttggatcgtgatactcccttgatgttccttaataattttatatgtaatcattaatccaagtcctgtaccattctcctttgttgtgtaaaaagccttgccgattttttctaacttctcattctctataccaaatccttggtcttcaacagaaatacacaaatatccttgcgttttttgatatgcacggatatgaatttctccaccctctggcattgattctattccatttttaatgatatttaataacacttgttttaattgcttatcatcaccgtttatagccggtaaattcccatctacttgtaaatgacatttaactctatattgcgttgcataactttccattagatgcacaacatatagaagggtgtctcgtatattacacctttcataatttgttggctttggtttccctaacaacatcaattcactaacaaatccattaaccctttcaatttcttgtagcataatgtcgtagctcatcgtatcagttggatttctttctttttgcatttgcgtaaacccttttaacgctgttaatggatttcgaatttcatgggcaattgttgtagacatagtcccaatcacagctaaattttccgtctctttcatattgttcatcatttcaaccactgttcttacataagattgaaatcgttttaataaagaatgtgaaataatgaaataaaatacacataaaacaagtggaattatcacttttaaatcttgtaatagcaatgtgaaaaatacgtactttccaattacactaaaggaaactaaataaaagtattttctattcacgaaaactggggcaaataaaattaacaacatttctaccatactaccatgttcaaaaggtctatccgttcgcaaataaatcattaaattattaacaagattgataaacatgtatccaaataaaaataaatattttacagaatatacataccctcttttttgaagatatatagaaataggaaataatgctattacaaatataggcacacctatcccaagactaccttctggccaccctaccgctgttccactaatattcatagcaggatatacaaaataatatatagcgtcatataaaaagaatataatataaaataataatataaatacctttaaggctcttctttcttcataaatcaagctcttgtatttgttcatataaaaactccccttgatcgatacaaaaaactttcattgttatctccttaaagtataagtatgaaattgctttcagggcaatatttaaacttataatactaaaaggaaggagatctctccttccttttagtaacaacttatatccaccttaccctatcatgtaacaatccatcagtaaaattattatgccctattacaaaatccttcatatataaatttaaatactcaccgtacttactttctgtatttaataacaactcctcgacgtaataagcaccttgttcaaattgatctaaaagtaaactagacaagcccgcataaattccgcaccctacctgaaaatacgttgcattcgttttatatttacgaaaaacttggctactattcattacattatacatatatgtctcactattttcataaacgagtaacacaccgaccaagtcctctccagcaacctcttcttccgctggattaaacactttacgattccagttccataaatcttctacttgatctaagttctgtctaattatatttgttgtatactcattaattcggtaaagaaaaccaacttccatattgaagtttttccctaaaattaatacttcctcatgtagcattaagcaaccatataattctttttctcctaacttcactttatactctgaagcatatacatcttcataaaagtaaagaggacgatgataactcatatacatcggataactccagatcgcttcatctaaaaatcgctctactgcccatgaagcataaagtgtatgtggctttataagtgccgtatcattcaaaaatgatgtgtcatgttctacaatataacatgctcttggcctttcatttggtcgttccttcataagctcaacaaccatccattgaacaacacctggattcatacctgaacctataatcgcttttgtatttgtaaatttctctttctccttctcaaaccttgtatatctttccgtaagctgaaagccgattaagctgtcgtcctgatctactgcttcattttccaaggctgaattaatataacaaattcctagttcattacaacagcttaatactctaattgtatctgcccctgaaacatcaatcacaacactcgttcttttttcttttaaatgttttttaaattccactacattttgaaggtttatttcatataaatataattgatctttcaaattcgaaaacagctcatcataataagtcctatctttttgttttatatccaccaaatgaaatttggcattctttaatactttataaattggatctttttcatttactatcgcttgatttaaaattgctaaaactgcttttgctgctccaccagcactaccaagcaatgtaattgataacgaattcggaaactgctccacaaacaaaacccctttaataaattagttgagcagctcctcctcaaaaaataaattgaatacataataagatagctcgtacacaatttttataagttagtgcacagttaccttttaaaaaatcacactataatatgtttatattcaattcattttcccctcatatccaaattagactaaaacaaataggctcgaccttttcttctccggataaaagaaaaagccagccctttcaactaatctacggacaatggacggattttacatgttgaatattcacatacatttttgcatcacgtgcttttgatatttcaatatgaccttcatcaattttcgccatttttccaattttattggactcctcacctaaatcgaacaccataattttcccagccattttaataagctgttcttcaaacgttctagctaacgtaatatttaacggatttacggggagttcatttttattgagggcatacggtacttggttttctttatacggaattaaccattttaaatgctttaaagatatatataccgttttataaaccggactataaaaaacaatatagtcgttcatcacacttgtaacataaccatgtattggagcatttcctgctacataaacttctgtaaaaatccctttagaagtacttaatacttttctcaaagaaattgaaggggattccctcttaattacagaatcaacatctggttttagtatgtcttcgtcatgtgctcttaaaaatttatagtattgtacatgatataaagatatatatacatagtcttgtccattgtaaagaacaataatgtcatttcctacgtctattaatatacctttaaaccttttttcaccgattaatttaacatatatattttccccaatacttttgtttaactcattcatctatatcctccttcctatgaatttcagctttactatcttccatttcaaaaaaataatcagggcaatgttctgtcttaatagtaagtaattccttttcatactatcgaaataagaaattgttcttctctttccctcataatgcccctcttatttattaaacattattcatcttcattctttttacatttcactacttgactcacactcttaatatgataattaatgatataaataacttcatcaccgtttactagcgtaatacattcttcatgcacttcacttaataggccttctacacactctgggccgccacgattaatctttacccacttatacttcaagtcacgtaatacatcgacgaaagtatcatcatcagagcagaaacatgaaacatagccatcgccacatttactttctttcactttcttaactagactcttcacatgtttcaattggtaatatactaattcaccaagaggaagttgtaatgtaaggtaatctcttcctaacgatacaagtacccccactcgactctctggtccacgaagatttacttttacagtctcaccgactaagcctttaatttgttcacagcataatatactttccaaatttgtatcctcctttcttattatcttcctcttcttgactgtctttgtgcgcgagctcgacccgaatcatcactttcactattgctttcactgtcgctttcttcgctttctctacaagctactgcgacactcttaatatgagatactgcaactaatataacttcttcttttacaattagtgtcacaaattcacaagaaacatcttgtaaaataccttcaactttctctgggccaccacgattaattttcacccagcaatatttgaagctttgaagtaacttttcaaagtcatcttcacattcacattccaaccatctgcaatcatctgctttacaatctttcgcattttttgtaatacttttcagatgacgaatctgatagtaatagagctctcctttttcattctttaatacaaagtaatccgaacatacagcgactattgttcctttttgagattctggaccacccctgtttactctcacaaaagatccaattaagtctttcagaaaatcacaatgaaataaactcacgagaaaaccccttccattaatttataagcttttgcactgatagtatatgtatctgtacaggttacgttctctatgtttgtcctagctagaaaaaaatatgcttttaacatggtagactactacctatcaaaatttgaagaaaggctaagaactccttatgtttttgatatcttcaaacaaaaaatcccttatgaatatacatttctgcatatcttcataagggattttccatagtttaatcttcgtctttaacatccatatcttctggaattggttcgttcaatatttcttccactaattgcttatatttctccatttgttctaaatgtgtattaaattgttctttatttactaaatattgctctccatcgaatagcgcacgaattttcttttgctgaattaactcttcaatatacgattttggtaaattcaaatactccgcagtctcttctactgttatatacaatgcgttcattcctttattattttttcatctatactgtatcttactttactttatttttgtaaacaaataaaaaagattttgtaaatgcagttcaaaaagcaggtagatgcattccatatattgtatagtattatatagtaagaattttttaaatatagaatggtattacccatttacacaaaggagagttaacatatggctactcgtcacatcattacaatgttagaaaaaacactacaagttgaaacagaaaacacaatttctcatttaaatgtatctttatctgatcgttttctttctcaaagcacagcaatacatgaaaacaattgttatcatacaattggtgaatggtacaaaaatcatttcttattccaacaagatgatttcctttgggctaaatatgccttctatgacgcatattgtgaagccatcaaaaaacaaggtcatcttacaaaacgtgttcgccaaatattagaatcattagctcgaatgcatggaaaacaatatattgcttccatactaaatatgccatttcctaatgaacgcgctaaagggacagcgtaatttagccatgttctgcgtaagcaaaacatagctaaattgttttctaggatgctttaccaataaaaagttcatatcatacgaactgatgaaaccggtgtcattataatgatagaaaatatagtaaacaggaaaacccccacgtacatctctcatccatttgaatagagaaatacgtgggggtatacttgttccttattatttcattatctgcttaatcagttcgcgatttctcttcttaaatacttcattatgagaagaaaccattccgtactcacttgcatctggttggataaattgtttggctttattcacagcatttccagcatcttggaatgcacctgcaattaaatgtagtttcccttcgtgctttaaaatatctccagcagcatataatccatctactgaagactcactatttgcattacctgcaatataataattatctataattgcaacgtctaactcactattttctaataatgtaatgtcgcgttcatatccatgattaataataacttcatcaataggtaaatgagaaacctcacctgtttcatgatttgttaattctacatattcgattgcttcatgattatcaccagcaattaattttgtaatcgatgtattaaagaaacactccgctgagctgttcataagttgttttacttgtgcttcatgaccagataattcttcttttctataggttaaatacactttttccgcaattggttctaattcatttgcccaatcaacagcagaattgcctccaccggaaataataactgttttacctttgaaacgctttaaagatttaactgtataatttaaattcgatacttcaaatcgctcagcaccctcaatagataacttttgcggtttcaatataccacttcctgttgcgacgataactgtttttgaaaagtgttcttccccagtacttgtttttaatgtaaaagtaccatcttgattacgaataattgattccacttttgtatctaatacaacttctggcttaaatgttaacccttgctgtacaagttgttcaattaacttatcacctgtaactggtaatagtcctcctacatcccaaatcattttttccggatacacatgtatttttccacctaaatgtggttgaaattctattattttcgttttcatttctctgagtccactataaaaagctgaataaagccctgcaggtcctccgcctatcacggttacatcaaacaattcttctcgattcattcgtgctcactcctcagctactaatcattgattatcattctcaataaaatataacctgtttccgcaaaatttacaatcaaaattactattgacaatacacctatataaaattatattatttaaagaatcaatagtgataatcattatcattttgttaataattagcaaatttgagattacatcttctttcattactatggttattactatattataaaatctcatattcaagatttttaataaattattttgcattaccactactatttcaaaaagattacagttaaacaaattattgtatacacatatcatctatgttaaaggagaaagacgatgaaaaagttatttatttcactaacagtccttttcgttcttgttatgagcgcttgtagcaatagctctacagacaaaaaggacgatgcaaaaggtagcaaatcagaaacaattacataccaatctgaaaatggtaaagtagaagttcctgcaaatccaaaacgcgttgttgtattatcatcattcgctggtaacgtaatgtcattaggtgtaaatcttgttggggtagattcatggtctaaacaaaacccacgttttgatagcaaacttaaagatgttgctgaagtatcagatgaaaatgttgaaaaaatcgctgaactaaatccagatttaatcattggtttatcaaatattaaaaatgctgataagttaaagaaaatcgctcctactgtaacatacacttacggaaaagttgattacttaacacagcatttagaaatcggtaagttattaaacaaagaaaaagaagcaaaaacttgggttgatgacttcaaaaaacgtgcacaagacgctggtaaagaaattaaagcaaaaatcggtgaagatgcaacagtttctgttgtagaaaacttcaacaaacagctttatgtatacggcgaaaactggggccgtggaacagaaattctgtaccaagaaatgaaattaaaaatgcctgaaaaagtaaaagaaaaagcattaaaagaaggttactacgcattatctactgaggtattacctgagtttgctggtgattacttaatcgtaagtaaaaacaaagatactgataactcattccaggagacagaatcatataaaaacatcccagcagtaaaaaataatcgcgtatacgaagcaaacatgatggaattctatttcaacgatccacttacactagatttccaactagacttcttcaagaagagctttcttggtaaataatacaaacatgaggaattcttaaattaagaattcctcttcctttattctatgaacagaaaagatgtgaaacgaatgacaaaagatcacgacaatccacgttctatagcttttacatacaaactaattttgagcataattgcattctttcttatttttatggtggcaatggtattaggggctgccgatacttcaataaaagatgtatggttagcgctcacttcctctgctaaaggggacaaaatatctattattcgagaaattcgtttaccacgtgaagtagctgcaatttttgtaggagctggacttgctgtttctggagcaattatgcaaggattaacacgaaatccgcttgcagatcctggattactagggctatctggtggagcaaatgctgcacttgcactgacacttgctttcaacccttccatcagctatctttacttaacattagcttgctttatcggtgctgcaatcggtgcgattatggtatttggaattggtatggtgaaaaaaggcgggctgtcccctcttcgaattgtattagccggtgctgccgtttcagcatttctactcgcaatttcagaaggagtcggcatttacttcaaaatttcacaagaggtatcactttggactgctgggggcgtaattggaacaacttggggccaattaaaaattattattccagtcatttcaattagtatctttatcgctatcttactagcaaaaaaattgacagttcttagtttcagtgaagaagttgctattggactaggtcaaaaaattattgttattaaaaccattctatttatcattattatattacttgctggtgcgtctgtagctcttgtcggaaatatggcatttatcggcttaatggtacctcatatggtacgtccaattgtcgggccagactaccgatttgttataccaatgtcagcaattactggagcttcctttatgctacttgcagatacagtcggacgtactattaacgctccgtacgaaacaccagttgccgctattgtcgcaattgtagggctgccattcttcctattcgttgtacgtaaaggaggaaaaacattctcatgatgcaatctattctaagaaaacaacgtcttattatactcgctttactaatactaaccatcacaaccattgtagttggaatgggacttggttcagcatctttatcttatgatcggctactcccaacattaatgggacaagggacttttaaagaggagtttgttttatactctttacgactacctagaattgttattacattattagctggtatggctctcgctttatcaggtgctatcctacaaggaattacccgaaatgatttagcggaacctggtattctcggtatcaactctggagccggtgttgctgttgctattttctttttatactttccaatagatgtaggttcatttctttacttactacctgttgttggatttatcggcgcatttctgacagctgttctaatttatgtattttcttatagtaaatcaactggacttcagccaatccgactaacattaactggtattggtttttcatttgcactatctggaatgatgattgtccttatttcatccgctgatcgtatgaaagtggactttatcgccaaatggattgcaggaaatatttggggagatgactgggtcttcgttttagcaatgctcccatggttaatcgtattaattccgttcgttttctataaagcaaatcgattaaacattctagcattaaacgagccagtcgcaatcggcgttgggattgaaattgaaaaagaacgcagatacttattagtcgcagccgttgcgcttgcagctgcagctgtttccgtaacaggaggaattagttttgtcggactaatggctcctcatattgcaaaatctttagtaggtccaagacatcaaattttcatgcctatcgcccttttaatcggcggatggctattgttattagcagacacaatcggacgtaatatcgtcgatcctaacggtattccagctggtattgtcgttgctttaattggtgctccttactttatgtatttattgcttaaaaaggcgtaagaaacaccctcaagattttttcttgagggtgttttttatttcattctactgttgcccatacccttcaaacttcttcgccaaattctccatctcatcttctggcaatagctttggttccccaatgcttttcgtttgataataaatttgagcacaaaactcaatctcttctgcaacagtaaatgccatttttatattatttgcaccagcaattaaaccgtgatttgcaagtagcacagcacgacgatcaatcatgccttcaaaagcagcatccgctaattgcttcgtaccaaatgtttcatacggcgcacagcggacattcggacctgcaaaagcaattaaatatgacacagccggaagctcccatcctaatgacgcaatcgtcttcgcgtaaggagaatgtgtatgcacaagcgcatttatatcttcacgcttcctatagtaaataaggtgcatatctaattcacttgatggttttctctctccttctattacttcaccatctaggtttaatataactacatcttcaggctttgtttcatagtactctaaaccacttgggctaatcgcaacaagaccttgttcacgattaaagatactaatattaccacccgtcccctttgttaaaccactagaaatcattttctttccatacgctacaatttcttctctttctttttgtaataacatatacatccccctaagtatgaagcttatgatgactgacttttatatttatctacttattgaaatatcttttttaaattctccgtaaacggtgcccttacaatccctttttctgtaataatcgctgttacattttcatgtggagtaacatcaaatgctggattatatactttactttctttcggagcagaatattgtccgaagcgattaatcacttcagaagcatctctttcctcgatgggaatttcttttcctgtcggtgtttttaagtcgattgtcggcgttggcgctgctacataaaacggaatgttgtagtatttcgctaaaatagatacgcctaatgttccaattttatttgctatatcaccgttcgctgccacacggtcgcatccaacaattacagcgtcaatcttcccttgtgacatgaccatagccgccatattatccgtaatgacagtaacatcaattcccgctcgctgtagttctaatgccgttaacgttgacccttgtaatcttggacgtgtttcatccgaaaagatttttaagtcccatcctttttctttcgctaagtacattggagccgtcgcagtaccatacttagtcgtcgctaacgcaccagcattacaatgtgttaatactcccattccatcatggaataatgttaatgcatgttctccaatttgacggtttatttcttcatcttctctatgaatttcttttgcctcttctagtaatctatctttcaactgtgagattgataaatgaatattatctgccgctacactttccattctttcaagtgcccaaaataaatttactgcagtcggtcttgatgtcgccaagtatgtacatacctttcttacttcatccataaatccttcttccgtactttcagcaaattcctttacccctaaatacactccataagctgctgaaacaccaatcactggtgcacctcgtactttcattacttgaatggcatcccacacactttcagctgttttaaatgattcatagacaatttcattcggtaataacgtttgatctaacaaaactaaagcatcatctttccactgaattggtattaattgctcttccatcatattctccccttactccgcgtagtgcattgactgttcttttaacgtttctacaaaacttctacctgttctatattgattcgctcgtaaaataaaactcttcgctactttaagacaaatttgctccgctctagcacgtgcttcctcattctcaatacaagtaatatcttttactttcgctaatccaacaatacggcggattaattcaagacctgtcactgcagctgtatcctctaatacagattgtaaatatacttcgttaaagccttcttccttcgccataatctcggtcacatgaatatcccaagcatctaaaaacttcttcttaaataaatcaattacctctaccatcgtagtttgtaaccaatccatatacgtatctttctcagctccaggtggcatcgttgcatctgcattcacccaagcaaacattaaattcgccattacattcccaacgtcatatcccataggtccataaaaagcaaactcaggatcaataacctttgtagaatcatctcttacaaaaacagaaccagtatgtaaatcaccatgaagcaatgcctgtgcattcgtcataaaagaaaatttacgtttcgctacttccatacgaagctctttatcactataaatatgctccctaatccatccctcatttaaaggaaataactcattacgcttattatgatttgtaaatggttctgaatatacgaggtcctctgtaatctcacataattcaggatttatataattcttcacaagttccttcttctctttatgattcattacaacatcagatgttaataaaagtgtatttaccataaaagtagttaagtcgtcagcaagctgcggaaatatttgatgatttataagtgctgtacgtaatattgtgtgattcgataaatcttccattacgcaacagttcatcacactatcaaataaatacaccttaggaacaagtccaggtgctaactcattctctaactgcaaaacatctgattctatacgaatacgattcgtcgataacttaaactcatctgaaatgcgagctgtatccccagcttgctttacgatgacagacatgttctcttttttatcccaaacgcggaacacataatttaaattgccatcacctatttctttacactttagcccctttgcatgttcaaacttagataatttctctttcacatatgcaatcacatcgctagcttccattaaaaaatactttgtgaacttagacatggtttcccctccacaccaattgtaagcgttttctaaaagctataaaaaataataggttgaattttttcatcctataaatatgtattcttctttttgaaaggtatatctaggttttattatatcttgttagcactttgagtcaatgtttctaactatcagcgtaatatacttcctaattatatatttgagatgacaaaaattgttcaaaaagatttcgattcattttattttatttatcgcacaattctttgtaaaatagaaataagcagttccttttcaaatacataacttctaagaaatatttccttcctaagaatttacacttacaccatatttctaacatacacactactctttcaaacaatcattgaaaatttataaacttaaagttacctttccattccctgttagccttaattgagaataaatattaattaaattggtataaagttggtttattctcttgacaaaataaccacttctatatgataattaatatcgaattagaattattatagttaattaaaaaatatattttatgagcacactattttttgatgctcaaaaccaacatttaggaggaattttaatatgttattaatcggcacagaagtaaaaccgtttaaagctaatgcttaccataatggagaatttatccaagttactgacgaaagtttaaaaggaaaatggagtgtagtttgtttctacccagctgacttcacattcgtttgcccaactgaacttgaagacttacaaaaccaatacgcaactctaaaagacttaggcgttgaagtatactctgtatctacagacactcacttcactcacaaagcatggcatgatagctcagaaactatcggcaaaatcgagtacatcatgattggtgacccaactcgcacaatcactacaaacttcaacgttttaatggaagaagaaggtcttgctgctcgtggtacattcatcatcgatccagacggcgttatccaatctatggaaatcaatgctgatggtatcggccgtgacgcaagcattcttgttaacaaaattaaagctgctcaatacgtacgtaacaacccaggtgaagtttgcccagctaaatggcaagagggttctgcaacacttaaaccaagccttgaccttgtaggcaaaatctaaggagttcgatcaaaatgatactagatgcagatataaaaacacaactatcccaataccttcaattaatggagaacgatattttacttaaggtaagcgcaggagacgataacgtatctaaagatatgttagctctagtagacgaattagctactatgtcatctaagattacagtagaaaaagttgaattagagagaacaccaagctttagcgtaaaccgccctggtgaagacactggtgtcgtattcgctggtattccattaggacacgaatttacatcattagtgttagctttactacaagtaagtggacgcgctccaaaagttgaacaaaaattaatcgatcaaattaaaaacattcaaggcgaatatcattttgaatcttatatcagcctaagttgtcataactgtcctgatgttgtacaagctcttaacgtaatgagcgttcttaaccctggtattacacatactatgattgatggcgctgcattcaaagaggaagtagaaagcaaagacatcatggcagtaccaactgtttacctaaacggcgaatctttcggaagcggtcgtatgacacttgaagaaattttagctaaaatgggtaacggtccagatgcatcagagctttctgataaagatccatacgatgttcttgttgttggtgggggccctgctggtgcaagtgcagcaatttacgcagcacgtaaaggcatccgcactggtatcgttgctgagcgcttcggtggtcaagtaatggatactatgggcattgagaacttcatcagcgtaaaaaagactgaaggtcctaagctagtagcaagccttgaagaacacgtaaaagaatacgacatcgatgtaatgaatctacaacgtgcgaaacgtttagagaaaaaagaacttattgaagtggaacttgaaaacggcgctattctgaaaagtaagagcgtaatcgtttctacaggtgctcgctggcgtaatgttggcgtaccaggtgaagctgagttcaaaaataaaggtgtagcatattgcccacactgtgacggtccattattcactggaaaagacgtagcagttatcggcggaggtaactctggtattgaagcagctatcgacttagcaggtatcgttaagcacgtaactgttcttgaattcatgccagaattaaaagctgatgctgtattacaagagcgtcttaacagcttaccaaacgtaactgttctgaaaaacgttcaaacgaaagaaatcactggtactgataaagtaaacggtatttcttacatcgatcgtgaaactgaagaagttcatcacgttgaattacaaggtgtattcgtacaaatcggtcttgtgccaaacacagactggttaggcgaaacagttgaacgcgttcgcggtgaaatcgtaacagacaagcacggcgctacaaacgtaccaggagtgtttgctgcaggtgactgtacaaataatccgtacaaacaaatcatcatctctatgggttcaggtgcaaacgcagctttaggtgcatttgattacttaatccgtaactaataaaaaacaggtgccttggcacctgtttttttattaccctaatgtataaactaaaaacctctcattcccattcttctcataagcacctggcaatctaacttctttcttcagctcaaacgcagtctgattttctaagaagaaaatatagtcctcagaaggataatataaaataatatccacttctctccccgtattttctactgaaagcaaaatgttatttactacattcataaacacttgcacagaaaacggattaaagaaataaaacctattatcatgtggatcaatcttatattcctgcgctaaacaacattggaattgaattttccccttactgtttcgtgcctttcgggcataacgatctcgattatccatcgcttctttataaaattcttcattcatttcaattccaactgctgaagccccacatttatgatgcatataaaagtttaatcgcccttttccgcacccaaagtctacaattcggtcgctacttcgtatttcatattgattcaataactcatctaacccgctatacggcgtcggttcgtagcggtgataatgcatagacttgttaaaccctttttgctcaccgactgtttttatatgtaaaactgcatcgtaatattgttcgttcattcgttttctcctattaaaaaatggtacttattattatacaccatgtactggaggctcatttttcatcaaattaataggtacgtgaaattatattaacgattttcttaatatatctatcgtaacttcaaatatatcaacgattttctcaatatatctatcataacttcaaatatatcaacgattttctcaatatatcgatttaccgacaattcacgacaaaaaaacaggagctctttagcccctgtcttctaacactttcaatacagtttgtttcaatatttctaccccatccataatacaactatgatcaaacctcatatacggatggtgtaatccaggttgtaggtctgctcctagtccaagcatgacagcttttaaatgtggtcttttcactgtatagtaatggaaatcatcgcttcctgtcgtatagagaggccctgtgcatctctcttccccatacacttcgagaatacctttacgcataaagcgctctgcttcttcggaaacctctgctcctggtgcaagatccatccattcgtatgaagttttcgaccccatcgatgcagctgattctattacatgctcaatctttttctttaattcttctaatagtatattactctcagctcttacatctaaactgaaatgaccatttcctggaatgatatttaaattatcaccacctgcttggcatctcgtcatttttactgaataggaactttgcggtggcagccaaatatttttcaaaccgatattaatcatggaaatgacatcaattgcattcacaccttggtgtggtcttgccccgtgtgcatcctccccatgaatcataccctctaaaaatcctgctgctccatggcgaatagatggggctgcttgtttcaaagatagttcttcaattggtcttagatggatgccaaataagaaatcagcatcatctacagcacctttctccaccatcttcaaagcaccattccccttctcttctgccggctgaaaaataaatctaaccataccacttttccatctcatatttttcaattgtaaaataagtcccattacaatggtcatatgagcatcatggccacatgaatggttcgctttaaattctccatttacttcttgccaaagtgcatccatatcagcacgaatcgcaataactggattcccgcctccaatctcagcaattacacctggacaatcatcaaatgttctatatgaaattccttcttcttttaaaaagtcagtaatatacgctgtcgtttcatattctttccaacttacttcagggttttcgtgtaaatgctgaaaaatctccgttaagcgctcttgtagttctaatgttttcaacgttccagtctccttcccacattacaaacgattcgggttaattatacttatgaaaaacagatgtttttatgaacatattgaattttaagaaaaaagtcaattgtttatttttaaatacttaaaaaccttactctgcacttatattacaaactaaacaaacaactagaacattccttattttctgttttttatgttgacgcttacataaacttttagttatcataacctaataaacgtctattttacgacaattctaaaaatacaaacaaacatacgtaacaaggaggaactttatgaaaaaagaaataccttttggaatagcgattatccctattatcattaccgttgcagttatgatggttacaattgttgtattaaaacaaacccctcacgttccacttattatcggtacaaccgttgcttctattgtcgcttggcgttatggttacaaatggaatgatcttgaagaagcaatgtataaagggattcgtcttgcattacctgctatcgtcattattattcttgttggcttaacaattggtgcttggattggcggtggaatcgtcgcaacgatgatttattacggtttaaaacttttaactccatcactatttttagtttccattaccgtcatttgttctatcgttgcattagcaattggtagctcttggtctacaatggggacaattggtgttgctggaatgggaattggcctaagtatgggaatcccagctccaatggttgctggtgccattatttcaggctcttattttggcgataaaatgtcaccgctttcagatacaactaacctagccgcaggattaacaaatacagatttattcgcacacattcgtcatatgttatttactacagttccaggtttaattattactcttatcgtctacgcggtcttaggaagaagcttcggcgctaacaatattgatgcgaagagcatcgatcaaacgttacaagtattgcaacaaaactttgttatctcacctttcctactcattatacccgtagtcgttatggtattggtcgctaaaaggtccctgctataccagcgattctcgtcggtattattttaggatttttatcacaagtctttattcaaggtggttctgtctcagcatctgtcggtgcactccaagctggatttgttatagacactggaaacaagctagtagacgaactatttaaccgcggtggcttagattcgatgatgaatacagtctcgatgacaattgtcgctatgactttcggaggagtattagaacatacaggtattcttcgctcaattgtaaatcagattttaaagttagcgaaatcagcaaaagggcttatcgcttctactatcgcatcttgttttgcaacaaaccttacttgctctgaacaatatatttcaattgttgtcccttcaagaatgtacgcaaatgcatacacagaaaaaggactacattcaaaaaacttatccagagcattagaagatggcggaacattaacttctgtcttcgttccttggaatacgtgcggtgtatttattctcgctacacttggcgtaggtgcatttgaatatgccccttatgctattttgaatttcatcgtacctattatctcaatcatttatggtataacaggcttcacaattgtaaaactatcagacattgaaaaagcagaactgctaaagaaacaaaaagctcaactagaagcttaaaaatagcggtaaattcagttcatatagtgcgcgaggtcgcccttgttgatagggcatttcctcgccgcaaatatgagcatacccgtaatcaactaatttctttaacaacctttctgtcgatcttcgagtcacttgtaagtactcagaaaggtcagctgctgtaaacttcaatgacggatgcgattgactaaattgaatgatttttgacaagttggccggactaagcttcgtttccttcgctattttcattagttccggattatcatttttcaaactttgtactctctgttctttcgggaacggaccaaacaaatctttatcacttgttagtatataaaaacaacgatctattggattattctttgcaaaactttgagcaatttttgcattttgctccgcctctttcacggtttttccataaccaaatccaatagctatcgttccttctacgctcgcaaacaagttatttatcgcatttgttttaataatcgattcgatatcaccacgagttgtatacaaaatacatgtcatttcatccacttgtttaaatgaaccacgtagttcttttgaaatgacatctagtttttcaagcaaactcgttcgtaattctagggaagaaataatacaagcaccaacagtagctgaatagctttttgctaactcagcttttatttttgcatcttttagaccatgtataatggattgtgttggatcaatcatgcgctctgaaggaacacctattttttgaagctcgtcgtaaacagcgtgaatactagttaaagctaaatgagcttctccagattgatatttagctacatgaaaatcgataactctatttatttcatctttactccacagcatattttcataatccaacacttgcgggctttcttttataccaatatcatggaacacatttgtaataaacgagcggtctactaaatcgatggaaatgttatgtggttgaatactttgatgatacatgatagaaagaattgaagatgcgacagttgtctcgtcttgctgtaagtatgtacttggaattcgtaattgttctcttatttcttttgccatataataaggtaaagcacctgagaaaaagatgacatcacaaggctttagacactttaataattcagaagattccgccggatgaaggtaaatatatggatcaatttctattccttctaatttttgagcaataggaaaaaggttctccataaactcctttgaaccgacaactgcaatttttatcatcattttctctaactccttatcattaattaacgactatttaacgtcaactatatcaaatgtacaaaactattgtaaacaggaaggggtttctattcaatgaaaattacagctattcatctttacgcaattcgtttaccgcttcgcaatccgtttgttattagttatggctcttattctgatatgccctctattatcgtcaaaatggaaacagatgaaggtattatcggttacggtgaaggcgttgctgatgatcacgtcacaggtgaatcatgggaaagtactttccatactttaaaacatacgctaacccctgctctaatcgggaaaaatccaatgaatatcgaaaaaatacacgacatgatggacaatacaatttacggtgttccaacagcgaaagctgcaattgatattgcttgttttgatataatgggcaaaaaactaaatcaacctgtatatcaattaattggcgggcgctatcatgaagaattccctgtcactcacgttttaagtattgccgatcctgaagatatggctgaagaagctgcttctatgattcaaaaaggttaccaatctttcaaaatgaaagttggtacgaatgtaaaagaagatgtgaaacgtattgaagctgtacgagaacgtgtaggaaatgacatcgctattcgcgttgatgtaaaccaaggctggaaaaatagcgcaaacacattaacagcactgcggtcattaggacatttaaacattgactggattgaacaacctgttatcgcggacgatattgatgccatggctcatattcgttctaagacagacctcccgcttatgattgatgaaggactaaaaagttctcgtgaaatgcgccaaattattaaattagaagctgctgataaagtgaatataaaactaatgaaatgcggtggcatacatccagctgtaaagctcgctcatcaagctgaaatggccggcattgaatgccaagtgggatcaatggtcgaatcatctgttgcctcttccgcaggattccatgtcgctttctcaaagaaaatcattacgagcgtagagctaacaggaccattaaaattcacgaaagacattggaaacttacattacgatgtaccattcattcgcttaaacgaaaagcccggactcggcattgaaataaacgaagatacactacaagaactaaccgtctttcaagacgttgtacgctaaaggaggactatcatatgacggttctatacgaaggaacattaaaacaaaataacgaatcatttcacgttacattactatcactagagcacatcgaacaaattttatcactacaaaacatcgtagttgaagcactagaagataaaagtcgtttacaaccactctcactagaagaatttcaatacattctagaaggaaacggcatgatgatcggtgcttttatcgaaaacaaactcatcgcatttcgcgctctactcgtccctcctatcgacgatgaacatttagggcttgatattggtctatcagaaagtgaactgcaccgcgtcatctatcaagaaatctcaaacgttcatccgaactgtcgaggaaatgggatgcaaaaaatattagcaaacgtcatcatggacgaattacaaaaagaagatagcaaatatgattatgtatgctgcaccgttgctccttttaacatcccgagtttgaaggataaatttgcgcaagggatggagattgctgcgctgaaggagaagtatggtggtagtctgcgatatgtttttgtgaagaaattgcgcggagataaagaaagcgattggacggatgttcaaagtattctaatgagtgatgctagtggacagcaggctttgctttcggaggggtatcgtgggtatgagatggcgaaagtggatggggattttgttgtgatgtttggacgctaacctatatactcgaaaagaggagatgtctgctgtgacctctccttttactttctcttcattgaacatatcgattgcaactccgaatatatcagcgattttcaaaatatatcggcgcaacttcaaatatatcagcgattttcgaaatatatcgacttaccgacaaagattgacaataattgcaacctatacaaagcgcaacattaaaccgtcatcttccaactagataaagctaaccagttctccatttccttataatcgggcatgattttcccgacaagacgccaaaacgatcgatcatgatttaaatgaaccatatgacacatttcatgaacaactacatagtcaattactcgctgtggtgccattgctagcttccaattgaatgttagttgtaaattcgaatcgcaagtaccccaagtacgactactatctgtaatacgaatagaacgtggttttgttttgaaattactttgatgcgctttaatactcttctctactaaagatttacactgcttatagtaaaatcgttttaaagcttgttgtattttctcatccttaagctctttcacataaatatgtaacttatcccctttaaatactgcgttgtcttgctcaatgcttgcatcttgggaaatctgtatcggatacgtattccctaaatacaaaaagccttctccttgatcataatccttttcctgtggtccatgcgctcgctcctgcatttctttacgtgttgtctgaatccacccccacttctcttctagcaactggactaagtattcaacaggtgtccctttcggagcctgtatttctacatttccatacgaatctacaaaaagacgcacggactttttcttcttataagttatatgaaaattaattgtctcacctaaatatgtatgtaccatttcatcacctagcatagtatttttacaaataaaaaagagtaggatacgaacgtcctactctacctattatatcatttactgctttaacgaactcattatcctctatactttacacctaatcccttaatgaaattccttgcgtatctatcgccgcactctttgtaatttttatgacctttttttcttaatagagcgcctaactctccttttgttaccgtaacgcctacgctatctaatatatcaagtacatcctcactcgttaaagatagtgcgattttcattttctttagaagaaggttattggcactctccttgctctgtacaggtgcaggctgccctggtttcggatcttgctttcctctttttaaagtaataaatccatttaaaaatgcctctaacatcatcatatcgcatgtttttacgtactcatcttcagctacctcatcattttcagcttcatgctgaggagctctctttatttttgtaagcatatcaactacgtcttctttcgttacttccatcccgccaagtttaaagatttctaccatatctatatcttttatatctaaagcgtatcgtactctttttaatatatcgttgttgctcattgccattgggtttcctcctgaaatgttgattatttattcagcggttaaagtttatgctataacctgctttaaattatcatgtttaatctaaccttttagttattgtccgctaaattaatactttaacattttaaagatatgttttatagtcttacccgaacttttctctatcattgtatctacagagctcttacatgttttttatatgcctataaaaagatttctctcttaacattaactaaaagaaaaaaacagtgctttgatttctcaaatacactgttcttttccagctctgcacttattttcaactcactcatgtcatgcactacatatgaaatgatttaactgcttaaaagttaaaccatctcactatcctgagccacaccaacactatcctcaaacttatccaacaaagcacgcacctcatcggtcgatttcgtactcatcaattgatttctcaattccgcagctcctgggaagcccttcacataaattttgaagaagcggtgaagtcctgtgattgagcgtggcagtacttctgcatattgatcttgaagatcaagttgtagtcttaaaagatctagatgttctttactgctatgttctcttggctctttttcaaacgcaaatggatttttgaagatgcctcgtccgatcattacgccatcaatgccgtatttttcagcaagttccagtcccattttacgatcaaggatgtctccattgattgttattaacgtattgggtgcaatgcggtcacgtaattttttgatttccggaattagttcccagtgcgcatctacttggctcatttcttctcttgtgcgtaaatgaatagaaaggtttgcaatatcttgtttgaaaatgtgcgttaaccaatcttcccactcgcttaactctttaaagccaagtcgtgtttttacgctgacaggcagtccacccgcttttgctgcttggataagttctgctgcaacgtctggacgtagaataaggccactcccttttcctcttgatgcaacgttcggtactgggcaacccatgttaatatcgatacctttaaaccctagttctgccataccgatactcatttgacggaagtattcaggattgtctccccaaatatgtgctaccatcggttgttcgtcttctgtaaaaattaaacggccacgtacacttttcataccttctggatggcaataactatccgagtttgtaaactctgtgaagaatacgtccggacgacctgcttcacttactacgtgacggaaaacaacgtctgtcacatcttccattggtgcaagtacgaaaaatggtcgtggtaattcacgccaaaaattatctatcatttcaaattcaaatcctctcactatgaatacaatttcaaaatctaaatttataatttgtgaaaatcagcaatatttattttaactaaaatcgcttatgaatggtatttttgtaaaccaaaaagcaggtggtatagattttttctatatcaactgctttcctattatactaacttaagccaagccacacactccacatgagtcgtataaagtatatcatatcttttggtatatcctatattactgtagtgcattcttttgcaaaaaaataaattaaaatgtcctcttgttatttcaaatgaatttaatttattttaagtgtgtggtcatctttgtggtcagtggtcaaaaaagagccgagttttatactttgctcttttttttaaaattttatctctcaccctctttaaaaagaacgtttgttcgtgtaaaataatgacatatcatacgaaattgagggatcatcatggaaaatcaaagttggggtacaccgaagattaaaggaagagggatggttttaacaatagtataatatatgagtagagataacgtatacaacgataggtagttctcttccgcaattacttcagcttcttctgactcttctgtttctgtaattacttccacttcttcaggtgcctctgtttccataactacttcttcaaactcttccgtttctgcaattacttctacttttgacacttcttctggtatttccacaatgattgtttcttcaagtttttcttctgctttgacaatcactgattcttctggagcttgcttttctacttcaatagtaggttgttttatttctgtattacgtttaatttcttctgataatattgtatcctcgtgctctactttagaagctactaattcttcttgtagattgttttcgtttaacaccactacatctttttctagcttagcactttccatctgctcagctactgttttatgaagtaattcatccgctgaaacttcctgcggtgtactcatttcttgaatcacttctttttcttctactaaaggcacttggcgttcaatttcataaccgtttttctctagccattgatcaactactgacttttcttcctttttattctctttatattgttgctctccttgctggttagcagctctatgactagaagaagttggtgcttgtccttctgagaaatcagataatgtatatccttttttctctaaccatgcatcaacgactgatttaccctctacagatatttcaaggtcttctctttcctttacttcctcctgcttttcttcctttttctctactgaaggacgattatatccataaattggcgaaatcatttctgttggccgaaatggtctacggttactctcttgcgctggtgtagatgctttctttacgacagactcccgcaccggttcatattgcacttccggctcttcatatgtagaaactaccttttccacatacggtcgtctgcttctttccacctttattcctctttgggcagtcggttcttcatatgttactccttgaacaggttgttcttcgaagcgatttacttcgctttcatcctcttcatcgaacccattatccggtactaaaggaaaacggcatttacctgcattcctacttgccatttgtgcttctcttgcttcagtgtagtggtttacacgaggaattttcggctgactttcaatttgctttggtacttctttattcatcgctgtttgttcttcctctttgttaaacagctttttcatccaatctaacatgcttaccactctttctactaaatagtaacatcctttattgtatcagcattcggcaaaaagtgcaggtaaaattaagcatgtcatatttatccataatattctaatttacgagtgttttcatataaaaaaacgcagtctttcatgtaagactgcgtttaagctttactcttccgatattcatctacactatccgttacactttgcaacaaggaatttacatactgcgagtcagataattttttatcttcttcaggatttgacataaacccaagttctaatagtacaccaggtactttggaccaattaaatccagaaagatcatccctgaatttaattccattcactttcacttgttgattctctctcattttatttacaatcgtttgagagatttgaagactttccgcataaatctctttcgtatacggacttccttctgccggcgtcaatacagcgaatccactttggtttggattttcagaaccatctgcatgaagacgtaaaaataaattagccttatgattatttgcgaatgtcgccctttctttattacttatatcaacgtcttgtgatgttctcgtcattaatacttgtatcccttttgcttcaagcttttcttttaataaaaaagccatttctaatacaagtacagcctctctctttttcgtcacaacacctgttgtaccgtctgtcactttatatttttgcgttgttgcccctggtccaatcggctctaaatttaaattcgctttttgttgatgccctggatcaataacgacgagaaacttctcttgtttttcattactctctactttttgttcattattttgcactggttgctcagtcggctgcactggcgtagtttcttctttcttttcatcagatgatacttcctcttgcttatgttctacttgctcattcgtttgaattgcttgcgattcttcgttcttttcttgttgcttttctaccggtgcgtcttctttggtatctttgtttttctcttgtatagaagatgtagtttcttttttcggctgcccttgtgaacaaccggccatatatattccaatgaatgcaatcatgctcattatttttatatacttcatacttctctcccatcactttgcaccggattcaaagtttttcttataattgccctataatctcatctatatttccaatataaactggttgccatttttctgtaccacgttctgcagtataaagcggataagcggcatcatctatatttacgaaaactggatcgcccatatccgtttcatatccaattgtaatccattcttctttccattttccgtgttcttcacttattaatgaatttttatgtttatcgtatcggtaaccgatttgtcctttttctaattcactttcactaaacaaatatatttcataagtacctagctcaacatcttgctgttttgaagtttcaattcgttttagaagttctgcgatttttggttgctgtttcatacttctatccccttctacttttctaaattttaactagattgtttataaaatacaatatagattttaagaaaaaaagtgacatccttatcatattaacgattttttaaatatatctatcacaactctcaatatatcaacgatttaacacgaaatttcgatttaccgacaaagaatgacaaaaaaagagaggctgtccaaaaggacaacctctcttttcttatatcaattaaaatttaaactcttgtccaacttcaaagctatcttctaatacaagaatacctttttcttgtggagcatctggaagctctaattcacgtgcagagcagatcattccagaagaaggaacaccgcgaagctcagctggcttgattaacataccgcttggcattacagcgccgatttttgcaacgacaactttttgtcctgcatcaacgtttggtgcaccacatacgatttgtaatgtttctgtaccgatttctactttacagatgtttaacttatcagcatttggatgtttttctttttcagctacatagcctacaacaaatttcggagaaagatctgcttctactgtttcttcaaagccattcttcgctaaaatttcgttgattttctctacaagctctttcgttaatgtaaggttgcctgtttcttttacttctaagtaagaagatgcattaaagatgttgaatcctgctgtctcgttgctttcacgatcgtatacgcgtgcaacatctcctttgcgatcaaaagtacggttctctaaagtaatatcttgtaaggcaacaattaaagtgtcaccaattccttcaaggttgtaaaaaacgttcacttcgttcatcctttctcttttccatctgtcttcttccgatttttcgctaaaataaagattggttcaaattctccatcttcatatacgaatgaaagtgatgtaatcggaacatgcccttcggcaaaaaatttcattgtcatttgtgcaataatatcataaccgatttcgttgacgatatcagcaataattaatacatcttggtgaggaacagcaacaaccatgtcaccagaaatcttttcacgcatcgattgtagtaacgattcgtttaaaatacgagtcgcgtcatacccatcatttgtgtttaaaaagtagaatgtattacccgctactgtgtcttgtttaaattcataacctaatgagcgtgcgttgaataatgccatttcacgcacttgctgttctgtaagttctaatttttgtaatagacgctcgtcaattagtcgatacgttttattcgaatctaacgcatagtaaatacgtgtttccgccgtatgatccgtcataataaacggatttccttcttctgcttgtttcgggaaagaagtagagcgaataacaggtaaaattttcgctccgctattttcttctttatgcatcgcaattagcgcttcttgtacgtaataagcaacttcttcaattgccttttctttgttcacttcccattttgccacaactcctggaagcgatacgttaataccttttttggagtctttttgttcaatacgtaaaacttctttctcactatcatactgaaagtcccattctgggcgagataatttctttattagctcatctttcatctttttacttgtcatcttcatctctttttcctcccttccaaaaaaataacctcccccgcgaaggtagaggttgttttacaattcaattggcaaattgccttattttaaaccttcaatgaactcttcgatttgttcttgtgttttacgatctttgtttacatagcgaccagtttcttcacctttattgtacgctacaaagctcggaatgccaaatacgtctaattttacgcatagatcaataaactcatcgcgatctacatagtaaaatgagaaatcactatatttctcttctacttctggcataaatgggtctacaaagcggcagtctgggcaccattctgctgagaacataaagactacattctcttcattttttaactgttggaattgctccatgctttctaatgacttcatctatatttcctcctctaacgggtacatttttcatgttataatctttcttttatactaccatacatcgcgcacggtgcaaggtttatgcttgctttttgtcatacttatattgcccaactaacaacttaacaacgtgtacaaataattccgtacggtcgacataatcatctgtaaaaataccgatcgcaccttcgtgactacgaatatcttttcgctgcacaaactcttccatcacttcgcttaattccttaccatcttcaagaggtgctaaaaaatcgtctggtaacgtaatacgcgctcctccggccacaaatactttcccatcacttgttgctagcgcgccccagttacacataaataaaccgtgctccgttttcattacgccgccttctagcccaatcccaattggagcttctccgtcctctagcgctcgcttcgctctattgatcgctccttgcatcgtctcttcatctgagaaaggctgagctgatactcctgacggaacagaaagagatgtaatttcagcatctttccaaaccttctccacagcgccaaccttcgttttattcttcgatccaactactactttcatttcgttcacctctataaaaattcatcattctattctaatatccgcttcggcacaaattaagtaccaaccactaccacacaccatcagggaattccttctccccataaaagaaggtcgctttctaaaatattactggtcctaaacacaaaaacaggcttcttctttcttcctacccgcggtcttaatacatcattcgagcacccattaggcactaaccgccaccactcatcgctgggtcatctattcaacctaaaaaaagaagggtttttcgcccttcttctctacgcgttattcttaattgtctctaacgtcgttttatctgttgttcttacaagcttcgtaattaattctttcgccgctgcataatcatcaacatgtaaaattgaagcatgtgtatgaacgtagcgtgcacaaacaccaattactgctgatgggataccagagttacttgtatgtacacggcccgcatctgtaccaccttgtgaaataaagtattggtacggaatgttgtttgtttctgctgtatctaaaataaattcgcgtattcctctatgtgttaccatcgtgcgatcgtagatacgaagaagagcaccttttcctaattgaccgaactgtgttttgtcaccagatgcatcgtttgctggacttgcatcaagcgcatagaaaatgtctggttgaatcatatttgcagctgtttgcgctccgcggaggcctacttcttcttgtacagtagcaccagaatataatgtatttggtaatgtttcatcttttaattcttttaacaattcgattgcaagaccacatccgtaacggttgtcccaagctttcgccataattttcttttcgtttgccatcggcgtgaatgggcaaatcggcacgatttgttgtcctggttttacaccaatttcaatcgcgtcttcataactatctgcacctatatcaattaacatattttttatatccatcggttttgcacgttgcgcgtcacttaataaatgaggaggaatagaaccaacaaccccaataacaggaccattcttcgtcataacttgtacacgctgtgctaataaaacttgactccaccatccgcctaacgtttgaaaacgaagcattccgtttttcgtaatttgcgtaatcatgaaacctacttcatccatatgacctgctacaagaacacgcggaccagtttcgtccccttttttcagaccaaatacgctacctaaaccgtcttgtacaatttcatccgcatatttgcttaattcttgtttcataaaacggcgtacatcatgttcaaaacctgatgcaccttgtaattctgttaacgtacgaaataattgtaatgtctctttattcacgaagtccccttctttcaaaccttagtagaatacctcttttattgtaacgaaattttcgaaatgtttctagtttcttcttttttagctgtatttgctttataattattatcggtacactatttttattttatagaattgaggtgaatatatgagctggaaaggtttagtagcaggtcttggcgttgggttcgcagctggttatctcgttgcaaacaaagtacaagaacaatcccatatttcttcagaaaaagcattgaaaatggtgaaacaagcattaagtcataaaggtgaaattactggctcttgggtacatatggttccagagacatttgaaaaatatgatgtcgcatatgaagtttatcgcggcggtcttacaacaatgttaaatgatatacaagaacgatttgaatttttagttgatgctaaaacaggtactgttttagaggttatagcagcataaaaaggagggttcccattaggtgaacctcttatttttttgaaattgcgggtattgattaaaattatatcagcgattttccgaatatatcggcgcaactcaatttatatcagcgatttcccaattatatcggcgcaactcaatttatatcagcgtttgtttaaatatatcgacttaccgacaaaacccgacaataaaaaagaggctgctccaataaatatgatggaacaacctcctatttttatgcttctatactcgttttccgttctactttttctacgatatgcccttcctcattccacttcacagcgcgataatatgcgtcatggtaaaacgtaaaccatgcctctttttcagcaccatacttcatccacttttgtttattttcaatcgaggtcatcggataatcgtcgtatgccattacccataatacattttgatgtgcgtgcgtcggtaataggtctgctaaatgaagcatcgtttccccatggctttctaaagcaataactgcatgtccatcactatgaccacctgtatgcaccatttttatttcatctgtaatttctatttcttgctggaacgtaacaacttgatctacaatcggctcccaattttccttccaatatgtattacgggatctaatatttgggttcctcatttcattccactctgtttcacttacgtaaactttcgcgttcggaaacgctggtacaaggtgatcaccttcccattttgttaaaccagatgcatgatcaaaatgaaggtgcgtcattaaaacatagtgaatatcttctggctttaatcctagtttttctaatgattcataaaccgatgattcttctgttacaccttgattccgcttcatcttctcattcaatttaccgtttcctattccggaatcaatgagcatatttccgtctttcgtttgcaaaagtaacggatctgttcgtaaataaatatgatttgtatcattatgtttatacttacgtgaccaaagtactttcggcacaacaccaaacatcgctcccccgtctaaatgtgtattcccgccttttaaccacgttacttttatatctccaatttgtaactgttccattacacatccccctttcaattaatcttaacataaaattctgattattttagatgtaaaaaaacctatgcattactgcataggctctgtacgatattttgcttcaactcggtaaatacgatgacctttactagagaatttctcttcgtattcagtcatgatgttaccttcaaagtcgctgttatgaagatctaagcttaagtacgttagtaacataccatactcagccatactcataagagaatattcaaatagaccttggttatctgttttgaaatgaatttctccgccttctactaacacttcttcgtaattacgtaaaaatgttttatacgttaaacgacgcttcgtatgacgtttctttggccatggatctgagaagtttaaataaacgcgatcaatttcacctttcgcaaagaaaactgttaaatcttcagcatctttattaattaactttaagtttggtaattcttcttcaattaatttatcaagtgcatctacaacaacacttgtgaatttttcaattccaatataattaatatgtggattcgcttttgccatatcatacatgaagcggccacgacctgtacctacttcaatgtgaattggttgttcgtttccaaatacttctttccagctaccagcgcgctcctctgggtttccgattacgatatgtgaatattcattaattcgatccattgcatacggtttatgtcttaaacgcatagatgtttccctctctttacatagctattttaaaggaataattccttctttcttttttaatcaatctaccaaacaaaaaaccaagtacgtacgagcactcggtccgtttctttcaagtataagatgtaccattttgataaaaactacatacagcattaaacattccatgacgaaacagctttttctcttacatttgaagagaaaaacaatcgaaaggatgatccgttcatgccaattaatcaacaacatcaattagaagtgctgaaagatattttagtcaaccaccaaagtgattgctgcgggacagtttcagaatgcgagcaattagagcgcctcattcaatcgttactcgcaaacgataatataagtagtgacgctaaaacaatgctaaacgatgtatattcttatagtcaatcgggtaaatcttcctctaatttggacaaccatatttccaataatcaagaacaacttactcagtggattgctggaatggacaatttttcttaagtattattctgaagcaagtagttgctgtaaatattgatgccaatattcagcttctgcttgctgtttttttgttgtatgccattgaatagacaaaatcgtttgtgctatcacataccatctcatacgcctaagcagcgattcatccatttcaatatcataataaccgagccactcactccactcctggcgcggaatgtaccaatataataacataccgaggtctagagctgggtcagcaattacagctccatcccaatcaattaaaaacaattcatcttcatccgacaatagccagttgttatggtttacatcacaatggcatacaacgaattcattgtattcaatagcttttaatgaatccattaaatattgaaggccttgctgaattgtttcatcatcccttatatctcctcttaaaacgagttgcagttgttgtaataactcttgtgcgtgaagcggctgcttcccaagtctttgaatcatctgtacaagcgctttagaggagtgtattttctttaaaagtttcgcaacacgttctagtttcatatcctctggctctagcttctgtcccggaagccatttttgagcagaaattacatcaccattcgttacccttcttgtccaaagtaattttggaacaattccttctgctgacaataccgctaaaaagggcgatgtattccgctttaaaaataacttctgttgtccgttttgcgcaatatatgcatcgcccgttactccaccagccggtacaagactccactcttttcctaataattgttccaaccattccatattcattacccgttaacaaatccttatcttttatagttatgaaaagaaaaaccgcaacatttctacacatgttgtggattcatatattttactgtaaatgaaaagaaaaattagcctaagccaaaaatcctctattttattttacaaaacctgtcatagaatgacaacttatcaaaatcgtcacctttgtcaattctacatttattacattctcatcgtcaagtagcgatttgtcacattatcgtcaatatatacgtgctaattggagcgagcctaagttcctttcctctaaatgaagaaattggctctattttcgcttcgttttcgtttactaacacatgccacgttgcttctttcggaagttgcacagttttagcttctaaaccgctattaaataagacgataatctctttccacggcccaaacgattctgcatgctctaggtgatatgcaagtacttctgtagatgtttgtaaaaaagtcatatgtttttttataaggtctgcattttgtaatcggaatgccccatgctctttacgaatcgcaattaaaccttttatatagttaacggtctctatctctttctctttttgatcccaatctaattgattgatctcatcatttgcattataactattttcatttcctttcttcgtacgataaaactcttgccctgcgtgtaagaaaggaatgccttgtgaaagaataaccattgcgctcgctaataggtgacgttttttcaaaatcgtttctgattcttcattactgcgcactagtttatcccacatcgtcatattatcatgacattctacatagttaatgctttgcgccggctctaaaaacagccctgtttctttcatacttaaaagacttcctgctgcaatatactgcaaatgattacagtctacatgcccaccaaatgcaaaaccacgcttatttatatgaaatgtactcccttttatcccatcacgaaattgatcattaaactgcgcgatatgtggcattttcttcgcattatttaacgttgctttttcctcaagaggaagcggtgtttgtaaatcccatccttctcctaataacaaagcatctcgttttatgtttcgcacttctttctctatcatattcattgtatcaacatctaaaattcccattaagtcgaatcggaatccatcgacattgtattcagtaagccaatataaaatagactctacaatgaatttcctcatcattttccgttcagacgctacatcatttccgactcccgtcccattagaaggcataccatcttcaccatgacgaaaataatatcctggaacaagcttctcaaatgatgatagctctctttcataaacatgattatatacaacatctataatcaccctaataccttgttcatgaaatgtttcaattagttgtttgcactcaactatcctgttatacggatcagaggggtttgtagcataaaatcctgttggtgcattgtaatataatggattatatccccaattataggcggacgaaggattcgcctcatctacaccaccgaaacaatataaaggtaataattcaacatgcgtaacgcctaaatcttttatatgagacaaacctgtcaatgtcccatttcgtcctgttgttccttcttccattagccctttatacgtcccttttttactcactccactgttcggatgaatagtagcatcacgaatatgcaattcatacaatatggcatctgtcattgcttgtaatggtggtaattgctctcgtttcgttacagtcgtcttttctaaatcgataacaatgccatactttccatttacagtcactgactttgcgtaaggatccaccgcttcgttccatattaaattaatacaaacaagaaatgtatagcgtgctccgtctaaatcaccttgtaatgtttgaatccaaactccgttttctcccctgtacatttcatgatcggtatattctttatcactcttataaattcttactttcgcaagccttgcagttggggcccatactttaaatgtcgtttcttgtttttgatacacagcacctaaatctgtaccttcgtaataatacttttcatcgaaaatttttgttcgaataacagcacctatttgtaaatcagtttcttcattccgttcatctcgtactgtataatacttccccacatctagcggctcttctataaagcactcatacttcgttgcatctggaagcgcaatagtatgagcaatcggtaaatctttcacattacttccttcttgcaaacgaaatgtccgacttgttccatacgcatgtgggagcaaaattgtaattttattcatttcatctaaataggcatcaaatggacgttttactttcaacataaaaaaatcaccatcattctcaaagttaaaataaagtgaaactttaatgagcgagaaaatttttccatcctcacttattattagccttcaccaattaggcgagataaaatgagctgcaaatgataaggcttttcttatcaacaagactctatacagtaactccattcttctctatagtatattcacctgcataaaaaacgttttcaacattctatttttgtaattttatttcagcaatcgatttatacttcggggtttctttcacgtgggattcgtataaagtaattgtatctgcttgaaatgatatttcaggcacttcttttatactttctaaacgaaacttttcttctcctatccatttacgagcaacggtaatatgcaggtgatacgggcgtatttctagagaaaatccattttcttcacaaatggcatgtacttgcttttgcaactgaaacaaatcgtgattctcacttaccttcgcccaaaaaatacggggctgattttccctaccaaacgttgaaaaaccttgtaacgtgaacgatagttcttttgtttctgcaactgtttgtaatccattttttattccctctaattgttcctccgttgcactccctaaaaatgaaagggtaatatgatagtcttctttatgtacccatgaacgaaattgtaattcctcttgcatgtcctttttatagttatacagcatttcttttatatgattcggtaacgtaattgcgacaaaataatgcagttccatgtacatcttctccttctttctattgttgcttttctttcttatctcattcaggtaaaaagaagccgctctccaaaatagagagcggacattatttatatatccattacttcgctaattcatgaattgcttgcgcgtaaattgctgttgcttttaataagtcttcaatttcgatatactcatctttttgatgtgcaagttcttcttttccagggaatagcgggccaaatgccacaccagcttttaatgaacgagcataagtaccgccgccgattgctaatagttctgctttttcacctgtttgttcttcatacacacgttgtaacgtacggattaatacgtgatctttatcgacgtgatgtgggcgagaattagaatagtcagccacttcaaaaccatgcgtaccaacatattctttcaacttcacaattgtttcttcaaagttagttgtaactgggtaacgtacgtttagccctaagttaccaccgttttctttcgtataagaaatgcgaccgacattcactgttaacggaccgctaatttcatctttataagcaatagtagctttttcaccaaaaatatcaccagtaaatgtttctgttgcaaatgtcgcaaatgcagttgcttttccatcaagtgaaactgtagttaagaagtttgctaataataaacctgcattttctcctttttcaggagtagatccgtgcgctgaaattccttctatttgcaacgtcactgcatttccttctatagtcgatttccctatttttttagcagtttgtaaatactcttcatatgctactgtaagtgcatttacatcttctcctgtaataaccgcttctgcaaaatcaggaaccatatttaaacggcgccctgaatcaaatgaaacaagttcatatgtaccttttttctcttcactaccattttgcacaacttgtatgtcagaaattcctttttctgcattaataattggaaagtctgcatctggtgcaaaaccgattgttggcatttcttcatttttaaagtagtgatctacacatttccaattactttcctcatctgttcctataatcatacgaacacgtttggaaagaggtaagcctaattctttcacaattttcatcgcataatatgctgccatcgttgggcctttatcgtcaattgcaccacgtgcaaaaatctttccatcgcgaatatccgcactatatgcaggagtcgtccagccatctccttctggtacaacatcaacgtgacaaagaatgcctactaactcttctccttgtcccatttcaagatgacctgcatatccttctaaatttttagaagcaaaaccttcagtttctcctttatgtaacatgaaagataaagctttttctacaccttcaccgaatggtgcgccctctttcgccgattcttcttcccatacacttttaatttgtaaaaattgttgtgtatcacgaattaaatcatcttttcgtttcgcaacttcttctgtccaattaattgctgacatcacgcatccatccttcactatattgtttctttcatcataacaaaccgaaatctcttatgccatacacgaaaactaaataccgaacaattgtaatatttcagatatttcttattagtttttcttttattttttcaaaaaaatttgcaggaatttggcgttttacgtagaattttatgtgttagttgactgaccatatatacaatgtcaactaccaatatttttctatatgaatatttgttaaatttctgtaaaatttaagtagattaaagcatgaattttatcatgtagagtacaatggtagtaacgaccttctttcctgaatggggtcaaaaaaactagtagaggagtggttttctcttgaaacctacaactactcgtatgctaacacgcattaaatcaatttatatgtacatcaatgaaaacggaacggtaacgacgaaagaccttgtagatgagttcgggatcacaccgcgaacgatacaacgtgatctaaatgtgttgcagtttaatgaactcgtgtatagcccttgccgcggtaagtggacaacaacaggaaagaaagtgagaatgacctcataatgaaaaataattgtatgtaaataaatacatacccctttctaataattagaaaggggtcttttctgcgcctataaaggtactacttttcagtatctacttgatatgtttttaacatttctacttcttcatctgttagctctcggtattgtccaagttctagttcttcatctaatactaacggacccatctctgttctctttaggtagactacttttttccctaccgcttcaaacatacgcttcacttgatggaatttcccttccgtaatcacaagctcaatttcagaaatatcatcgcttttcaatattgtaagtgcacctggcttcgtttcatagccatcatctaaaataacacctttagcaaactcttttacatcctcttctgttactactcctgcaacgtgtgcataatattttttcggcacatgctttttcggagataataattgatgtgataacttcccatcatttgttatcaataagaaaccttccgtatcgatatcaagtcgtccaactgggaacggatcaaagattgcatcttctaattctaataaatctattactgtttcatgattatcatcttccgtcgctgaaataacaccttgtggtttatgcatcattaagtaaacaaattctttgtattccacaacttcaccgtgaatcataacttcttgctcttctacatttacatgaactttcgcatcttttactggcgttccatcaattttcacaacgccgtctttcaataatttctttacttcttttctacttccatatcccatatttgctaataatttatctaatctcacgtttttcaccttctttatttatcatagaaaagggggacgtaattacgcccctcttgatttcaactttattttaaatctactaccaagtttacgttgaattttatctaatgcttctccgccaaatactctttcaagtactcctgtgcgaattgctaacaatccgtaaacaagaccgccaatacctgcacaaattgcaactgttataagagcaccaatacggccatcaggcgaaatcatgaaggatagaagccattgtgatagttttacagcaacgaccattataagtgttagtactgcaatttggaatgttcttttatatacaacaccgaatgaatagtgtgcgtattttttaatttgttgatttgtgtaccaaacagaagctaagaaaccaactgctgttgctagaattgctcctactgtaccgaaataacgaataaagattacgttacatacaaatttcaaaataacgcccattataagcgcaataatcgcatgcttctgctggttaataccttgcaggattgccgctgttactgtaaataaagcgaataacaacgcaactggtgcataccacattaatacttgtccacctagtggatctgaatcgtaaaacgcagtataaattggatatgccagtgaagaaataccgacaactgctggcaatgttaaaaacatattcgcctggaatgtttgtgtaatttgcaatttcaaatagcggtattgtttttcagtaaatgattttgtaattgctggtacaagcgttaaactaaacgctgttgcaagtgatacaggaatcataattaacttatgcgtccacattgtgaaaataccgagagctcgctctgcgatatcaccttgaccaatcgcctgcataattgagttaaatgtcaatgtatcaatttgttgatataaaggaattgttaacccaattacaacgtaaggaatcgcatatgcaaataactctttaaacaattgaacggtgcttactgttgattctggtacagtttgttcaattagatattgatccaaatattttttacgttttaaccagtaccaaattaacacaccgagtgctccaaccgctgaaacgaacgcagcaaatgtcgctactccaactgctgttgcaactgtaccgccaagtactttaataacgataaaactacctgctaataaaaagacgatacgaataatttgttcaataatttgtgaaacggtagttggtcccatagactggtgaccttggaaataaccacgaattaaactcgctgctggtacaacaataagtgcgaaacttacaagacgaataatcgtcgtaacttctcctacattattgtgtatactttgtttaccaagcatcgcttctgcaaacaatggcgccgtcatgtacagtactaggaacgaaagaactcctgttactatcatcataaccattcccgagcggaacattctccggctcgttttataatcgccaagcgcattatatttggaaacaaattttgaaacagcaagtggcacacctgccgttgcgatacttaaaaagatcgtatatggaatgtatccatatgtatagagcgttccgccttctgttcctactaatgcatgaaacggaaagacgtaaatcatgcctaagaactttactaaaaatgtccctagcgtaacaataagcgttccgcgcagaaatttcgaatcggacatacaaaaatcctcctacatctacataaagtgaaactataattagttggagacttctctcctactccttattagttgaaccattcgagcatttacaggctaacagactccctatttacttctcctaaatcttgaggttttagtcttatcgcctacaaatggcaggatagtgctgaactctaacttttgtattgtaccacaattctctcattaagcagtacttcactctatttttcttttaagggaaaacatgctattcttttaggcaggaaatgtagaaaatgaggtcgatatattatgcattatgatgttattgtcatcggcggcggtccttctgggctaatggctgcaattggtgctgcagaagaaggcgcaaatgtcttacttcttgataaaggaaataaacttgggcgtaaacttgcaatttctggtggcggacgctgtaacgtaacgaaccgtctaccacttgatgaaattgttaaacatataccaggaaacggtcgcttcttatacagcgctttttctatttttaataatgaagatattattacattcttcgaaaatcttggtgttaaattgaaagaagaagaccacggtcgcatgttccctgtgtcaaacaaagcacaatctgttgtagacgcacttttaacacgattaaaagacttaggtgtaaaaattcgtacaaatacgcctgttgaaacgattgaatatgaaaatggtcaaacgaaagcagttatactgcaaacaggtgaagtgttagaaacaaatcacgtcgttatcgctgttggcggaaaatcagttcctcaaactggatctactggagacggatatgcttgggctgaaaaagcgggtcatacaatcacagaattattcccaacagaagtacctatcctttcaaacgagccgtttatacgtgaccgctcattacaaggccttgctttacgtgatataaacttaagtgtattaaacccgaaaggaaaagctatcatttctcacaaaatggacatgctcttcactcatttcggcctatccggacccgctgctcttcgctgtagtcaattcgtcgtgaaagcactgaaaaagtttaaaacgaatacaatacaaatgagtattgatgcattgccagaggaaaatagtgagcaactatttcagcgcatgctgaaacaaatgaaagaagatccgaaaaaaggaattaaaaacgttttaaaaggttatgttcctgaacgttacttcctattcttattagaaaaaaatgaaattgacggtagcgaacaagctggacaagtttctcacgaaaagattcgtgcacttgtgaaagactttaaagagtttactgtgaatgtaaatggtacgcagtcaattgaaaaagcattcgttactggcggcggtgtatccgtgaaagaaattaacccgaaagaaatgtcttctaaatttacgaacggcttatatttctgcggagaagttcttgatattcacggttatactggtggctataatattacatcagcccttgttactggtagaattgccggaacgacagctggagaaaacgcgaaaatgcagtattaaaaaaagaaacagggattcctgtttctttttttataggtacatgaaattatatgagcaattccacaaatatatcagcgattccgcaacttatatcggcgattccccaaatttatcagcgattctgcaacttatatcggcgattttccaaatttatcgacttaccgagaagaaacgacaaatatctgctccatgtaactttccattgcttttttgttgctttatttaccttagtacctttatattttatattgttgaatatttaaaaaagggtaaggggaaaacaaatgagaaaaaaagtcatgatgtctttaatgttaatgacgtttctttctgcggtagaaggaacgattgttagtacagcaatccctcgtataacgagtgatttgtcaggcgtcgaacttgttagttgggtatatgcaatttatatgcttgcaacagctgtttcgactccaatatacggaaagctcgctgatttatttggccgtaaaaaagttttactgatcggagctacaatctttttagtcggttctgcactttgcggagtcgttacatcgatggaacaattaatctttttccgcgcgcttcaaggtatcggtgctggtgctgttatgccaatcacaatgacgattattggagacttatatagcgaagcgaaagaccgcgcgaaagcacaaggttggatgagtgccgtttggggtgtatccggtgttatcggaccgttagtaggtggatttttagttgattccctttcttggcgctatattttcttcctaaacgttccattcggaattatcgcttgcttaatgattgcaatttactacaaagaatctattaaagctgctaagcatcatatcgattatcttggtgcaacagtcttctcattaagtacaatcgctctactatatgcattattaacaggtagcagtaagcaaaactggggagacatgacaattatcggcctattaatctttgccgcgatttcatttattattttcttattcatcgagaaaaaatctccagaaccattaattccgctagcacttttctctaaccgcacattatctacgataaatatattaactcttattgctggcgcaatgattattagtattacaatgtaccttccaatttggagccaaggtgtattagggaaaaatgctacagaagctggacttattttaatgccaatccctgttatgtggacatttggcgctattttctctggtaacttagtaggcaaattaaaaacgaaacaaatcattttacttggagctagcattttatcagtcgctacgttcttattatttacactatcaacaaattcaccatcgttccttatttatgtagcagtcggattattcggcttaggaatggggcttgtgacaccgatttacatggtaacaattcaagcagccgtaccagctcatacacgcggaacagccgttggtttaaacacatttattaatacattcagtcaaacgttaggtgctgcaatctttggaacaatctttaatacgatgattcatgcacgcggcattaaaaaccttgatcttgtatctggtggacacggcgggactacagcaagtgtagccactgaatcacaatccgcattagctgcaagtgtacacgttatttatatgagcactttcgtattagcagtatgtacattaattatcggttggcttttattaaagccagctacacaaacaagtgagcaacaataaaaaggatgaccattttggtcatcctttttttattcttcattctccacaatatgtttcagcatggataatttattatcccaaaaacgttcataatatgagagccactgttgtaattcttctaatggttctggatgcaaacgatatatcttctctcttccgctttttcttccacttactaaattcgcttccgaaagaatatgaaggtgctttacaaccgcagtacgactcatcggaaaatgatccgttattttggaaatcggtaactctttgtcacttaataaccgtattacttctcggcgggttggatcagcaattgcttgaaatacatcatatttcgctgctgacgaggacacttagccttcgacaacctttttcagtttttcatttacaattgctacccaaccaccgctcattctatcgcgaataatagagctcttcgcatttgctttcggaagaatttcatcaggatgtttccagccgccgtgaattaacgtaaattctgttttgttatctcctaagtctttcaaaataaatgaaacaacccagccatctgtatcccatgagaaagacaaatggtttggctcatcaatttctaacactttacatggtgatggcccaaatggtgattgcacatgaaattcatgtcctacctctaatacaaaatcatttggcataaaccatgacgcaatcccttctgcagttgatactacactccataccttttgaatagacgcgttaaaaacgattgtttgtttaatatcatttaatgtattttgttgttccattttcattctcctttactcggcgttacaacataacaccttttggttatacttcgataatataacaccttttagtttcatgtcaacgccaattcttttactgttgagaaattctcaacattttttcaacaggacaaacaccctcttagcattccctcataatatactcacaaaggcaatacaaaataaaaacttctctcaacatgaaactccatcattcatattgaaagaagcgccttacttatatcatgcgtacttcgtctctcctccttccctcaagggacaatacgcgagatatgacaaatcagaaggaatatgcccaccatttgagtaggtagttatttctcttctcctcaacatttcctcaggagcgaaatgactaccgactcacttttttcaaacaaaaataaaaaggggatgaaagctatgttctattgcattaactgttctgatattcatcatgaaaaacatccgaatgataaagtattcaaaaacggtttttatattgatccatttttaggtgatcgttatcaccttggtatgtgtaaagatgcccaaaatcatgaaacaggggagcctcttttaacgacaaagaaattaggcacaccccaatctattatgaacgtattaccgacacatgttgtcccaacataaaacataaaaaagagctgggtgagccagctcttttttatgctttataaacgatcattgctgaaaaacaataaatttggttttcatcgtcgttaatggaaacaccaacttgatacttaatatctacaaagttgctatcatcaatctttttcaaaaacacattcacagcgtcttctaagtctttttcgtgactttcatcaaacactttcacacgaatcatgttaacaccatcctagatcgcagccctccgccgcttgattattgccacggtgcgtatctatgatgcgataaaactttccattctcatatatatatccgtcttctaacacatattttttatcttcagtatagacataaaacttacctatcataaatttactcgtatataattccaaataatttggtctaaatttagctacaactttatttgtaatatcaatttttattgtgcgccccaccttctctccctcctttgcaaagaacggatttaggtatattgtattagcgcttttacattttatgcttaaaaataagtggatatgccctctttctcacctgtactatttttctaaaaaaatcactataaagtgaaactttaatcagcccgaccacccacctaacttctttgctttcgctgaattttgaggtgggggtcttattgcccgttaatgcgggataaataagttcaaaaaaaaacataaaaaagcactttatcttattgactcgaatataaatattatgttatcatataaaatttgacatttttacatacgtatgctatcattaaaagtggttaccacatatggaggtggatgatttgtttcaaattggtgataaaatcgtttatccaatgcacggtgcaggaatcatcgaagcaattgaagagaaagaaatattaggtacttcacgtcaatattgtgtgatacgcatcattagtaaagatatgcaagtaatgcttccgatggatcaattaaaaaaatcaggtattcgttatatcgttgatcgaggtacgttagatgatatacttcttgaatttcaaaacggggagtcagacccatcactctcatggaaacaaagatatacaatgaatatggaaaaaatgaaaaatggcaatttacaagatagcgcagaagtggttcgggatttacttcgccgtaataaagagagaacattaaatgcgagcgaaaaacaaatgctagataatgcacgaaaaatgatgatcagcgaagtcgcgctcgtacaaaatgttactgaacatcaagcaacagaatttcttcaagatacaattaatcactaaatttaaaatagctggccgctatttttttttgtaaaaaaaggacgaagagttttatctcttcgtccttttatattacccacgcccagcttgaaacgatggatataacgtcattccaccatctgcaaatagcgtaattcccgttacgtaactcgcctctgatgaagcaagccaagttgctactgctgcgatttcttcaggttttccaatatagcccataggtatcatactttctacgtcagcacgttttttaggatcagcaaacttttctgcattgattggcgtattaattgcacctggtcctatattatttactcgaataccttttggcgcatattctagcgctaacgtttctgtcatcagtttaatgccacccttacttgctgcatagtgcacaaatagtggccacggaattttctcatgaacactagacatattaatgacagaccctttaatatcatgttctacaaaatatttaatcgcttcacgacttcctaaaaaagcacctgttaaatttgtattaattaccctattccaatcttcaagcggcatttcatgcgacggtaccgcgttttctatccctgcattattaatcataacgtcaagcgtaccaaactctttcacagcagattgaatgagattcacaacatctgattcgacggttacatcaccttttacagcaatcgcttcgccgcctacctttttaatttcttctaacacatcattcgcttctgattctcgtgagcgataattaataaccactttcgctttttccttagcaaacctcactcccatcgctcttccgagaccagttgctgatcctgtaataacgacaactttccctgctaaatcactatacatttccatacctcctttaacttttggctatacctaacataattccggctgcgataataaaaacgataccgacaacgatacccgttaattgacgtttcgttttcttttcacctaatataaggatcccaccaagcgtggaaataataattcccatttgcgatagcgagaaacttgttgcaactccaacacgcggctgtgaaatgaataaaaacatatttccagctgcccaaattaatcctggaataatattgcgaattgcatatttattaaatggatgatgtttaaaggtaagcaaaatcccacctaacaccataccaactgcttgtggcaacaaagccgaccagccatctacgttaaataacctaattactactacgtaaactaaataaccgactgttgaaattaataaaattacgatacctcttttaaagtttgctgcttgctctgcattcttttcttcttcactttgaagcgatgttaaaataacaccgataataatacaaacgagcgctaaaatcccaaggacgaccgatattgtcgtggaccattcatgaaatacgataacgccaaataaagtcgtcgcgactaattgaagtcctgttgaaattggcatcgtcctcgaaacacccattaaatcaatacttttcaattgatttgcctgaccaagcgcccaaaataaacctgacacaactccaactccgataacggtaggtgttaatactggcttcataaaaatataaacaacaattgagaaaataagtgctccaaacgttgttccgagcgtttgactatacgggcccccgcccagttttacgttaaatagcacaatacttccccaaaatatagctggtaaaatcgctaaaaatatatccatcactcattacctttctttactaaatgccatagattatcactctaagtcgttagagtgagcttttattttttctttttcccgttcacaaactttttctgcaataacgtcagaaacattcttttctcgctccactttctttatctttacgtgatctaaatggtcttccaaagtaagcgtaactttatcgttcggcggattatgcgctccttgaaatgtaagaaattgtagcttcacttcgtatctaggaacaaattcatctttcttgccgagacgctttatatctataactgaagcacattcatattgatcttctgtcacttgtctaataactgaatagtacctatttgataatgcactctctaaaagctgttctcttgattctttcgcgaaagaatcgcttggagaagagaaaaaggccacacatagcattgtgataactacacatatttttttcatagttccctccttgttctatagattagtgttctcaaaactgccataaaaaaacgactttccctatgtaggaaagtcgttttaatgaatccaatattaaccaccgctcactggtggaattagtgcaacaacatcaccagattggaccctgtcatcttcatttgcgtattcttcattaatcgcaaccataattggctctgaaactggtacattatattcgttcgcaacaacatcttttaactgtgcaaccgtaatattttctttctctatttgtaattcacttgtccctgcttcttcttgcaagtgcgcaaataacaatactctaatcatacttatagctccttcccaggctctcccgccggatatggtgttttttctaattgatcaccaatccatgagtcaccatcttcccaaaactcctttttccaaatcggaacaatttgttttatgcgttccataatatattcgttcgcttcataagccgctttacggtgtggtgttgaaacagcaacaacaaccgctatatcagaaatttgcaacgtaccgatgcgatgtgtaatcgcaacatatgtacctggccatttctctttcacttccaagccaattttctctagcatcttttctgccatcgtcttataagcaacatactctaagtataatgtacgacgccctttcgtaaactctctaaccgttccaataaatgttgtaacagcaccgcattcacgtcgaattactttcttcgttacttcttcaattgagatttctgtatcaattacttcataatatgtatttatcatttcgcactcctaaccgtttgtaaaaaccagtctatgtacaactcttcttctgttatatgaaatactttatattcttctcgtatatttgccggaacatcataccacgtaataaccgccacaatattttctactttatgtaaaagctcaatgtcttccgcagaacgaagtaacactactttcgagtaattctcttttttatagccttctattaaaattgtatccacttcaaaaaactcatataagcgaataatttcttgcaaggaccatttctttcttagtgaagaaagtgaaagcaatccagcaccttctacactacttacgacagcaccagctttacggtgtctttcgctatctttttgcgctacttctggaaagcctccgtgcccgtgatgtttaattgtagcaactttcatttttcgttcagctaatgcatgcaccactttctcaacaagtgttgttttcccgctattttgatatcctactatttgtaagattgaagtggctttgcccatggccaatcacatccctcagagtgctctaacaataatacggatactttcattccggtctcaaatcctctcgttcctccaggtaacacgataaaagcattcgcatctgcaagtgaagataccgcactcgatttatctaaaccaactggcatcgcttgtaacgccccgtccacaattgttacgttcgctcttacgaaacgagtaaatggatttggctttggaaaatctttttgtaaaatagcatccgctctatatacgtgaggttccttcgcatacaaatacgtttttataattggatgcacaaataattcaaagcctacataacaagcagacggatttcctgataaaccaaagagtaactttccatcaacttcagctactgtcgttacacttccgggcctcatggctatcttattaaagagtacatttgcctgtaacctttcataaatagctggtaagtagtcataatctcctactgatacaccgcctgttgtaattaaaatgtcgacctcatccaccgctgattgaacagctgtaaaacatgcatctaactcatccgcgagttgaccataataacgaactttcccgccagctttcataatttgagctgcgatcatatacgagttactatttctaattttccccggttctaacggctcatgtacttctaataattcacttcctgtcgttacaataccgacaacaggctgttttacaactttcacagtgctatatccaaacgttgctaataaggcggcaacacctggattaattgcaacgcctttctgaacgagaacttgattttgttttatatcttctcctttaaacgacacattgtcaccgttattaaaagggcgttttaacttcatatatgttttcccgttcttctcaaacccttctgtcagctctagcattacgactgcattgcaatcttttggaatagctgctcctgtcataatacgaaccacctgaaaagatcctacttcttctgtaaaaacagaacctgccccgatttctcctattacttcaaattcaactggattctcttgagttgcttctttcgtatcttctgctcgaatggcgaaaccatcgtaaggggaacgatcaaaatgaggaacgtcatgatctgagacaacatcttccccgagaattctcccgtaactttccgtaatagaaatttcttctacttcaccatgctttgcatatttcattacccgttctactgcctcagcaacttgaattggaattcgtttttctaccatcgtttctcacctcatatttgcaattttttttatctcgattaaactttatatattcaatagaaattacttcaaggaggaattccatgtcttcatttacacactttaatgaccaaggacgcgcgaagatggttgatataagtgacaaaaaagcaaccgttcgaacagcaattgcgtgctctagcattgtcgttacgaaagaaatttacgataaaatctctcacaatgaaattgggaaaggtgacgtattagcagttgcgcaaatcgcaggcattatggctgcgaaacgaacttctgatattatcccaatgtgccatcctttactattaaaaggtgttgacgtttctttcgattggaaacaatcagaagaacaatatcgtttactcattgaagtaaaagttaaaacagaaggtagcaccggtgttgaaatggaagctttaacagctgcttcggctaccgctcttactgtgtatgatatgtgtaaagctgtcgataaaggtatgattatcggcgaaacgtacttacttgaaaaaacaggcggaaaaagtggagattatacgagaaattcataatcctttctccgttgaacctaaaggattccctttaggttcaacctatatatcttgcatataaacttttcgctacatttatatcattcgtcccatgaatgaaagctctgccatctgtaaataaaacaaaacgatattcttctaccggaaacgacaataaataaggtgtcgcctttatctctacgcttctttgtaagcgctttttaatttcttccaaattaaaattcttccgcacacctggacgaatttgcactgtatttcgcccacataacacttctgttttcgtttgtgcttcaaatgttaaactcggatatgtacgtaaccttccgcaagataaacaagtatcttttttctgcctattcactttaaatgccatctgttgattattccaaagatcaaatgataacatcgtttcacgaagcgctccgtagtcttctactaatattttcagcgcttccgtagtttgatgcgcaactactaattgtactgccggttgtataataccagctgtgtcacatgttgctccgctcgccggatgctccattaaacagcgaaaacacggtgttttccctggtaaaattgtatacgttactccatagcttccaacgcacccaccatatatccacggaatattatacttttgtgaaatatcattaatgagaagacgcgtttcaaaattatctgtcgcatctaatattaaatctacatcattcactaattcttccatttcttgcaccgttacatctgtcacaaccggagttatttccacctcagaattaatcgctcttaaatgctctgctgccgctaccgccttcggtttatactgctttgcatcttcttctgtatatagttgttgtctttgtaaattactccattctacataatcacgatcagcaatcgttacttttccaacacccgctctaacaatcgcttctgcatttgccgcaccgagagcaccagcaccaataataagcacatgcttctctcttatttttctctgcccttcttctccaacaccagaaaataatatttgtcttgaatatcgctcctgcatgcgatagccccctttcttatcctcctatataagacatttcgatttttggacgattttttgcactttcttctgttcgttcatccgaatacctatcttttctattcatccatacatcttgtataacacttaataactcctcatccgaaagatttcctctaagaagttctcttacatccaaaccctctgtcgcaaataagcacgtataaaactttccatctgccgaaattctcgccctcgtacaagagacacaaaatgactcagaaacagatgtaataaaaccaacttcaacatttgttccaacgtaccgatatcgcttcgcaacttcaccaaagtaatgcgcttcagctggctcaagcggatacaccttatgaatcatctcaatcaattctcgttttgtaacgacttgatcaaaattccacccatttgtactaccaacatccataaactcaataaaccgaagcgtgattccttgctctttaaaatacgcagccatcggtagtacttgatgatcgttcatcccttttttcacaaccatatttacctttacttccaagcccgcctctttagctgctataattcccttaattaccggtttcgtattaatatttcgaccattaatattcttaaatatgtcatcatctatcgcatctaaactaacattcactctatgtaatccagcttcttttaatgccttcgcttgtttcgttaaatgaatagcatttgtcgttaaccctatatctattagcccatcaattttcacaagacgtgcaataagttttgttaaatctttacgaagcagtggctcaccgccagtaagtctaattttccgtacaccgatgctaacaaataattttgccaaacgctcaatttcatcaaaagttagtaaaaactcgtctttcaaaaaagcatattctggcccaaatatttccgctggcatacaatatgtacatctaaaattgcaacgatcaatgacagatatacgtaaatcttgaagtgggcgtccaaaaaaatctttaaccatctcctgcatcgccaccctccctttctgccaaatttctttcttttcattctattataatatattttcgaactgcgatgtttttgctcaagtgaataaagtgaaactttaaataattagaggggattcactccccctggttaacgaggtttacttacaaatacaaagataaaaaaaccttgaaacataaaagcttcaaggttctctgcttattaacttaatctaataatagtcagggtagcccctggcgttgctgtagataatgtagctattgcaactactccaaataactgtaagctaacagcagctccagcaggcaagttagcaattattgttgcactaaatgaaccagtagccactgtcggggcgtttatcgttcccgcaagcggactgccatttacagttatacgagaacttacaagtaatcctgccgttaaattaattgtataagctatataataatttcctgcattcgcaactgtaaatacagtatttccaccactaacggttattcctggaccaatattttgattgttcggtaatggtacattcgtaccacctaataaaacggaaatagcggttcctgatgtattattcgcaaatgcatacgttgcagttgtactaactccagtcaccccggtcgctcctgtggctccagctccggttggacctgtatctccagttggaccttgtgaaccggttgctcctgtagcccccgttggaccttggattccttgcgggccttgaattccttggggacctgtcgctccggttgctcctgtagctcccgttggaccttgaattccttgcgggccttggattccttggggaccttgaattccttggcttcttgatgttgcctaacttttttcaaaatgtcctttacaaagggtacagattaatgtgatgcatctctttttcttactacttattgttttcatttcctatatattcaatagtttcttttaatagctcttcaaagttaataggataatcatgatctaagtcaggcacaactttatacttatgttctatatttttctctcttaatagttgtacaaattgctgcgtggattcgaaacaatcttcatcttgattcccgcatactatatatccttttatatgtttatccttcagcactcttagcaactcatcccattcttcaatctcgggaagccatggtgccataaaaacaaaaccatctacatttatatcttgttgtaaaatcgtatataaagctactctcgcccctgcagaaaaaccaccaatgattacactttctactgtatgattttctataaacttattgtaatgctcttttaattcctctttccctctctctatgtcctcccaaacaaatccatctgaaaactcaatttgtgaagactgtggtaaagctaacatataatcttgtatcaaaacagatttccaatatggttctactatttgtatattttcttggttaccatgcaatgtaagtagtagatttccctctttcttactgtatatatatttcacatctggtctttcctttttatgtgctaattcttctctttctttacataattgcaccattgtatgaaattcttcaaatttatgtagtgattttaaatcttcatcggaaattaaatactcatttccataccagaatcccttttctataatggcctctctcattaaatgtaatgcttctttttcaagtcccgatgcacttgcgagtgcatacttaaaattatatatttgcgcctcattccctattacacctgtagcgttttccattatataattgtacgcttcaaaacttcctttatttgcataacaacgtaacgtttcatttaataattgaatgtaagtcatactatttttcatgtaccaattcccccgcaactttttataatatttattttgcgaatctttataccactttgtataacccacgctaacaataccttattctcaaaatgatgcttaatagttgctcttccctgtccaatacatttagtataaataagaatagactgaaaaatcaatattttaacaaacaaaaaaagacaacaatatatgtattgttgttttcattacgtctacccactcttttgtttttttctatctggtttacttgaaactaaataatgtttttctgaaatatataagtctctttttaagctacgatttaagtaaggtcctaatttcattccacatatgaggcgatcttcgctaccttcaacaattgggaacatttctttttctgttacgtattgatctactgctttttgtacgacatcaatttctttcactaggtttaaattttctgctgtatgttcaaatacctcaagcgtttccttcgttatgagaaaaacatttgttggaaatgcaggtaaatatggttttaacaaatcataatttactgtataatcatcatttactaatactgtataaacgatattagcattcgtttctaaaaactgagccatcgcttgttctaattcatctttcgtaatttcccgctcttcttttccagttctgaaaaagcgaaacatcgcatcgcctcctttttactatattatagcataaaagaaaactgaaaaatcataaaaaaacccattgaaataatttttcaatgggtttctatatatttatcgttattttaagaatgcacttagcatccatacatgctgttctaatgttgtatgaattgctaacagcatgtcagctgatgtttcatcgccagcttcacccgcaacttccataccttcttttaattcttgaataagtgcagaataatcattcactaatgtttgcaccatttcttctgcagattctttgcttgtcccttcactgacactagatgttgcgagatattctttcattgtcgctaatggtttaccttctaaagctaaaatacgttctgctaactcatcaatatacgttccagcctcattataaaactcttcaaatttctcatgtaatgtaaagaagtgtggccctgtcacataccagtgataattatgtaatttaacatataacacattccagtttgctacctgcttgtttaatacttcaacaacatttgttttcgtactcatacaatcactcctcttatcattttgtaatgtttatcttttaataacttaattacattttaccatacattccctttcctttcgaacaattggcttatatgtaacaaagttttaacacctttaatgcttccctaatatcatttaattcatgtattttttcaaccacttcatacgtctaattgtccaagctcatacatatgcataatagtacatcaagctcatcatagtagaaagagggataacatggacaatcaacaatggcaagtagcaaagaaagtagctgctacttatatcggaactgtcgttggagctggatttgctactggacgagaaattgttgaatttttcacagtgaatggattatacgggacaattggcatatgtgtaagtggatttttttttatttggcttggcacaaagatgatgttactttcatcacaaatcggggcattttcagcgcaagaatttaacaaatatttatttggggatgtatttgggaatgttgtaaacacattattattactcgttttattcggcgtaacgagcgttatgttatcaggggctggtgcagtatttgaagagcaacttcgcttaccaagacaactcggtattctcattacagttatcgcttgtctcattataagtagccgcgggttacaaggtgtttttgaagtaaatacacttgtcgtacctattatgatgatttttattatcggacttgctattacaaccttttttcacggtacacctcctattaataacactattcctgcagagagctggaatatgaaatggattactagccctattacatatgtcgccttaaacctttctctcgcccaaagtgttctcgtcccattagccagtgaagtaaaggatcgaaaagccattttttggggtgggattttaggtggtgctggactttctttaattttattatgcagccatttagcaatcttatcagtcgatcaattttatcaatataacatcccaatggctgaagtcataagaagatttaatgcaacttttcacttcttcttcgttctcattattttcggtgaagttttcacaactttagttggtaatgtgttcggaatgacaaaacagatgcaatctattactgggtggaaaaatcacaatattattttcttcattttactaattagttattgctttagttacatcggttacagtgacttacttcacattctatatcctatcatcggatgggtaagtattgttatacttccaatcattgcgtttaaacaacttcaaaaaacataaaaaagcatccatgttattggatgcttttttatgttcattcacaatcatcacatacttcccagtacggtcccatttctaatgctaaatacggctttaactgcaaccgaatcattcgactaggcatgcgttctaaaacaaattgaataccttcttcatcttcgtctaattcaacttttgaaatcgtaattttttgcatagtcgtaatgggaattccatctttatataaagtgattttcacctcatcgtattcattaaaatacaattcgacactcatttgatttttcagtatttcatcaccaattttaaatgtatcattttgttcttggattatatatttccatccgcctctatcttctttcggagctgtttgaaataatgtctccaaatcctcgtatagcataagataacccctctcttactaaaaaacgatgagtattttatataccctttatctctatcactatccatagctattgtaccatatatcaccgttcttaccgtattcatttgcttcatacacacttataaaataactaattctatctccattattatgtatattacctcattactccatacactcttacaagttcaaataacgacagactttaatccatgcaaatattgtctactctccgcttttattagctcacagcattcacacttttacatatagtaagactaccacaaataaaaaaggagagtgacttataccactccccttaaaagaacttccctatagctgctaaaactaatacgattattaaaattgcaaataataatgagacaatgaaactaaaaataggtaacgctttcttttcattcttcttaaatagtaactttaaactaagaaaaatatttactggtacaagtataaaataaaaatatttaacaatttgcaccgagctattcgaaagtgtttttaatataaacacttcaattagaaaaacaataaaaaatgaaatacttagccaaaatgagacgtaactaagccaagaatgtctttttgtcccccaatacactcccataatactctccttttatttgtattctataggttaataattatacacaaagctaacaaacacctctatttttcgacaaatattatgcaaaataccattttaaacgtcataaaggaagtttacatctccatttgattttacataataaaacagactaccctctagtgtcataatgctactagggggagtctgttctctattaaactttaaatctctcaattaatacttgcaattcttcagccatttgagatagcgtacccgccgctgatccaatttcctccatcgaagctagctgttcttcagctgaagccgcaacattttgtgtgcttgtcgcattattttgtgctgtcattgcaatttgtcctactgaaatagatacttcatttgccccttttgacattccattagccgtttcaaccatcgtcttaatttgattagctatttcatttgtagattgtaaaatttcagcaaaattttgcttcgtttcatttgcaataacaagtccagattgaacttcttcatttacatgattcattgatttgactgtcttacccatatcgtcttgtatttcgcctattaatttactaatttcactggaagatatgctagactgctctgccaatttacgtacttcatctgcaacaattgcaaaacctcttccatgttcaccagctcttgccgcttcaattgccgcatttaaagctagaagatttgtttgatctgcaatgttttgaattacttccaatatatcaccaatttgttttgatttattatttaataactgtataacagcatctgattgtgaaaccgattctgcaatagactgcatctggtttactgttcttcctactagtttcccaccatcttctgctttttcacgagtatgagcagaagcgatattaatagatgatgaactatttgctacatgctgaattccttccgttacatcaaacagtaacatagcaccattttctacacttgttgtttgcgtcgttgccccacttgatatttcatccattgctgttgtaatttgctcagttgcttcactcgcttgtcttacacttgcagttagttcttctgatgctgctgcaacatgtcctgccgaagtgttaatccttccaattaacgtccgtaatgaatttgtcatctcgttaaaacctttcgcaagttgaccaatttcatcattagaatgaatttcaattgtttgcgttaaatccccttcacttatttctttagaagtgataactagtctctttaaaggcttcgtaattgaaagtgtcacaaaataaataagtactccacctactactaacgaaataagcataacaattaacatattataaaatacaggttgagcagcttcaattacttcagttgcgtacatcgtcccaccaattttccaacctgtttttacgtttgtagcaaataccatattcttttcactaccaccataagaatatgtaaaagcaccatgattatcttcataaattttctttgcccaagaatcagctgctttatcccctgatttttcttgtggatgagcaatgattttttgctttccatctaaaatgaaggcatatccttttttaccaatattgattaactttgttgtttttaataaattgtctaaacttaaatctagcgcaacaaccccatttttatcttctgtttgttttgcaatcgttacgacaatatgtccatttccttttgccttatatggctcgctaacaacaataccaccttgttttgccactgcatctttataccaaggtcgtgttgttggatcataatctgctgccatttgtatatttggttcctgtacaaatttcttatcattaccggcaacatacacttgttcaacatctatatttaaattgatatactgagataatgtctttcttagctcatcctgattatccccttgatacatattcccttgaattactcgtgcaaagttattcacatcgttaaattttgcttcaatcatttgattgattaaattatctaatatttttatattatcgttagcactactcgtaatttgtgattcaaaattctttttagcagtttgataagacatgcccccgattatagaaacggctgcaattaaaattacaaagaatgaaattaatagcttttttgctactttcatatcacgaaacaaatttaatagtttacccattatgaacctcctaattttcaaatttaaaagttaaattgagttaattataaatatttcccattccttaattattattttcataacctattatggtgaatactttgtaaagtttaaacaattaatttccctttgtctatatatatgaataatattattataaaatttacaaatagaaaaaaccaaaggggcccctttggtttttacatttttttatgttgtttagaaattttcttccatttatcacgctctgctctggcaaggattgcatcttgtttcctcataaaatacgccagttctctttgtaattttttatagcttttcaaacgatctatcgtaataagtccgttttcaattgcactatacaccgcgcatcctggttcattctcatgcttacaatcacggaaacgacatgttgtcgcaagttcttcaatatcagagaatgctgtttgaatcgcttcgctgccttcccaaagttgcaattccctcatgccaggcgtatcaatcacgagagcgccactaggcaattggaataattctcgatgcgttgtcgtatgcctccccctactatcctcttcacgtatatctcccgtttttgctacatcaattcctattagagcatttaacaaagttgactttcctacccctgatgatccaactaaagcaattgttttccctgaagaaacgaattgtttcaacgaatctatacctgtatgctctaaactatcaacaacgaaaataggaacaccaattgctatagcttccgtttctacaattttctcttccacatcattacatatactactctttgttaaaacaataactggcatagcgccgctttcatacgctaataataaataacgttccatccttctaacattaaaatcatgattaagtgcattcactaaaaataaataatctacatttgctgctataatctgttcttctgttcttgttccagcctcttgtcttgagaaagagcttcttcgctggaaaatacgatgaataatcgctttcttttcatcttctattttctttatatacacccaatcaccaactgctggataatcgcctttcgtaatcgcttcatgccgaaacttcccagacagttctgccatatattcaccatcattacaaataatgcgatatatatgcttatgctcaagtaaaatacgacctacttcataatttttctctgtaacttgttcttcaaaaaatgaatcccagccgaaagattctaaaatattttgattcaaataaatatcctccctagtttgtactaagtggaaggattgcgaattaccttatataatatcgccctttccatccacctttgtatttggttgattattcatataagttattttcgccataatacatcaccccgttcttattttaattattctcattatatggaattctcctataaaaagctacattattttacgtaattttcaaataacttgtttttgagcattctaatttgtcctcgatgactaatttcatcttctagcacatgaaaccatagatagtgctggttatatgctacaccgttaggccactttctttctgacatgagccactcatcaccttgttcacttaaatacttcagagattcttctcgaacactttgtagaagttgtacataatactttatttcatgaccacggattgctctacccgcttcccctaaatacagtgcatcttcccatatttctaattcttcttttgtaaagtcacgatcttgaaatgaaataagctgatgaactttttcaatagctgctatatgctttaataaggcgccaattgaatttccgctgctttgcataattaaatctaattgctcaactgataaattttttacttcgcctaatgttacagctctcgtatgctcaagcaggcttactaattcccctatttttttgtataaccatctacacttcttattcgataatctatattcatatcacgcacccctttctgcattcatattattgtaaaaatgattcatataatagactgaaatctatctaaattttctgttataattaatttgaatacaaaatatacccaaacaaactttctcaatatgcttatatgaaatattaaaaggaatcaatatgaaataatcgaatcttattcactaaaaggagtggattcgatggaaatgtatcaatggctaaccgctgttctcgttggtggcattaccggcttcgtttcccatctaatcaataaccaaggtaagttattgcttccacgccgtttgaaaacattttttcattttggatttttaactgatatttttactggtagcctagccgcacttcttgggctcgttttattcgatgtcaccgcaataaaagaaattataaaagtatccattgtaactgctatttccggtcaaacttttttactacatcaagctcttggtggcgaacaggctaaaaatacgcaaattgggaaagctgatgagaagattcaagaaattgacaaattattgcgacgttagtgtatactttcttttaaaattattgttataatgagaaataaatattttctattgcgtcgtttgtcaggagaaagggtgtttcgtatgacaaaaaagaaaatagaagatttcttaacaaactccgaaaaagaggaactgctagaaaactataaatgtttacgagaagcccgcacaaaaagcgaagctaactattttggcgaagcagtaaaccatctattaaataaagcaaaacaacgaattattaaagatgcaggtatacatgatgaaaatgctgcaactgttcaatcaaagagaaaagcactgttttagctacattagctaaaacagtgctttttatttagaatttttttctttccatgctatattctctctgcctttatctttccatttttacagtttcaaaagtcatctagacctaaagatcaacctaataatattagcccacgcaaaccattttaataatagataaaataattgaactagtaatgctacaaactaaataagtttattaaatcgcttcttttaaatctgaatgcggatttggtccgtattgattgtcattttcttcactttcaatgataaaaaatacaagtaaaacaatgctaccaaacggtacaaaatttaatagttgccaccatcccgttttcccaatatcatgtaatcgtcgtgcaccaaccgaaaaacttggtataatcattactaacataaatagcaacgcaataatagcaactaacacctctgaaaatgatgataaaaataacagtagccaaaaaattacgatattggataaactaaaaatccagtactcttttcgcgtagctctaccactaaaattcccataattctttagagctttcaaataccattgcatttaaacctctcccttttatccccaataaaattaaaatatgtaattattaacagataagtagaaatataacacaacatttatgtaaaatccatatccccatctaaattgccctctatttaaatagttttttccttcggcatttttcacattactttcacatctatttcacaaatataagtagtccgatatgctaaactaagtatatccttttccaaggaactatatgccgatatataaatccctatctttatagggatttttattttttgattcctcataactttgttacaatacatttcttctactatctctatacttttagtaaccactttaattaaaagcacattcatgtattcacactcttattaattctgatttgcgaaatatttatacaagctttatgatgcaattcctgtttcactattttcagtaattttttcactttttctaaacaaaaataaagctcctatatatagtaacgcagtaaaactacctataagtataaaattgtgagatattgcaaataacattccagctattgccgcaccaatcatttgaccaatgtacatagaagcatttgcaagcgccgctcctgttcctcttgctacactagacatgttttgtaagtgcctcatcattaatacaaacaaaattcctgtcacaaaaaataaagcaaagaacaataactccaccaatacaatgttctttacatgaggaagtaatacatatagcactgctgtaaatataattccaccatagaaagaaaggttataaccaattttatttacgattctaggaccaaaaatattaccaattaaatttcctaatcctaatacgagcatagctgtacctacttcatgaacttgtaagccaaattgaatggaaagccatacaccaaaaaatgaaaatgcagcaaaatttccggtttgaaaaacaaagtatgcaaaataagaaagtgaaacctttgaatctgtaagtaattgtttataacgctgtaaaatcgcttttttatttccacctatatgaaccgactgtatttctggtaatacaacataaataagaatgacaagtagtgctgataatataccaatgaaatagaatggaattgtataatgtatcgttgctaaataagctcccagtggcagccctaaaatttgagagattgataaccctgctgttgcaacaccaattgctttcacaatttgcttcttctctataagaagcggaatagatgcccacacttgtggagatacaaaagctgcacttacacctgctaaaaatctaaatgttagcatccataaaaaactcggtgcaattccacaaaaaaacgtacttattgcaaaaaaactcatacctagtaccattactttttttctgtttaatccatctgatataggaccagccacaagcgcaaatccagcataccctaaagcatacgaactcaccatccatcctgacaactcagttgaaacatgatacacctgttgcaatgtcggcaacagtggtgaaattaagaaagtatctgtaccgatcataaacattatcataaaaaatacagctagtactctgttcatttagaccttctccttatataaacagagggtactctccctctgtttaactaatcttctaaaatagattggatttctttcatgactctttcattcaatgcaacatctaccgctttcacactttctcttacctgctctgcccgctttccaccaggtataacagtatcaatcccttctttatttaataaccatgctaacgctaaatgagacacttcaatatcattttctttagctagcccttttaacttattcactttcttaaaattactcttatatgtattttcttcaaatagatttacattttgacgccaatcgacttcatttaatttaaaatcttctgtatattttccgcctaatattccaaaagcaagaggcccatatggaataaatgaaatacccgcttctatacaatacggcaacagttcttcctcagctgtacgttctaacatattgtatggagattgtacaacatctatatgaccatgttgattcgcctcttttaattgttctatgtttacgttcgatattccaattgaacgaattttcccttcttcttttaaatgagtaagctctccgattgaatctatgtaacttgtttcaggatttgtaaagtgtaaataatataaatcaatatattcagtctgtaatcttcttaagctattttccacagcattccttaaataacttggttcattgttaatataagtttctccatttaacaacggttgaattccaccttttgtagcaagtataaactcatgacgttttccctttaatacttctcctactaattcctccgatctaccgaaaccatatgaatctgctgtatcaaaaaatgtaatcccttgctgaatagcttcttctactaatcgctttccttcttcttcattcacatcagcatataaattatgtccccctactgcatttgtacctaaacccaactttgaaatatttaatcctgccttttgcaattttatatacttcattttttctccccctatatttctattgttcgaatatattcgaacaatagaaatataccactttatatgttatagtgcaaatatcttaacttatacaagtaggtgaaatatgcgtacactctatcatccaaatcgagaagaaattcaattttcttctgtcttatatgcacttagcgatcaaattcgtttacaaattgtaaatatgttactagagaaaaatgaacaatcttgtggtgctttaaacatccctgttgcaaaatcaactttatctcaccatttcaaagttttacgtgagtcaggtgttatgtacacgcgccttgaaggaacacaacgtttcatttcaattcgtgaagaagatttaaatgctagattcccaggtttattacaagttgtattacatgcgacagagccatattaaaaaaacatctcatattcatatgagatgtttttttaatatggctattcttttaataaatctattaatccattcccttcagatgtacgttcgtaccctaaaggtacagttcttttaatgagttgtgcatatatttccggctccgataactttcgaccgtattctttctcacactgtttaatgagcaaggcgagcgctccagcaacatgcggcgtcgccatggaagttccacttagcacagcatattttccttctggatacgtagataatatttcatcacctggcgctactagatcaatttcttgatttgaattactaaaacatgcaatcttccgctctaaattaacggcaccaacttcaattacctcggagtacgcacccggaaagtctagttcctctgtttcatcatcgcaatctccattatttccagcagcacatacaacgagaacatcctgctttaccgcattttgaattgcttcatgtaattctggaacatcttgcggaccaccaagtgacattgaaataattctcactttctcttgattcggccctctccaatttacagcataatgaattgcctcaataatttgctcataacttccagaaccatctcccgctaaaacttttaatactaacattttagcaagtggtgcaactcctaatacaccgacaccattttcagtcgcggcaatcgttcccgcaacatgagtaccatgtccgttattatcaagatacacatttggatcagcttcataatcttttgtgaaatttcttccgccgataatacgatcttttaaatctatatgattagtatcacaccctgtatctaatacggcaacgactacatcttgccccttcacactcttttcccatacttgcggagcgtgaatcagttgtacacctggtggaatttcatttacttgttctaccaccttatttacggtaaacggaatcaattgtatacctttttgtttattcactgtactactcatcgtaatccctcctgaaaatgtattattttcatttcagaccacttttgaatacgtgtaaatgtaacattcgttttattctttttgttttccttcttttcaaatatttctcaacatcatttactacctctataatacttctttattttccctatgatttgtaggaagtaacaacccgagtcgttcaactaataaccaaaataagaggaccaattaatggtcctcttacagtcttttaaaagaatgatatgtatttgaaaaataatataaattaagactaaacctcactcttgtttaaaaacttttctatttcttttactaaatattccgctccctctatgccaactgtaatatttccatttgctaatgtaatattctgccctgaaacatcacctgtgatttggcaagcattgtaaggttgatatttttgtaaaatgattttatctgcttctacaaaaatttcaagcggtgatttgatttgtattcccaatacatcgcgtaattctttagggataacaattcgtcctaattcgtctacttttcgaataactcctgttgctttcatatttctccccccttactctctattaattttttcacctcgctttttccattttatcactttttgacaatacttgcctctttttagaaaattttgtactcgagttaaaaaaacacatttaatgcatacgtaatctctctttcaattgttttacataacgggatcttataagtaagaagtatacaacttgaataactatgaaaatacttaatacaactgtattttctttaaacaatgagtactcaaacatttgccctaacgccgttaaggctactgctccatgtaatgttgcaacaccaattggaacgaagaataaaagcgccaatcgaattgtaactaccttcgataattccctacttgtcaatccaactttacgaatcatttcgaacaaacgaacatcatcctccaaatcggagaataaacggaagtaaaggaaacttcctgcgcaaacgaaaaatactataccaataaagaaacctacaaataaaatcggtcctgcaatttgtaaactttggttttgctcgtactcttccgcactaaacgttgaatattcttgatacggtttaatttgatgcgtaagctctttaccaatttcaatctcatctttcgttctttcagttttatacatataatcttttgtctctataaacccatcttgtaatgaatcatattgattattagagattacataaacatttcctcttaatattttccccaatgaagatgaagtaacttttttcacttttaaattttcattcatattaggtaaagtaatttcttttctttctttcatcgttggccctggtatattagctgacaaaaatacaacttctttatttgctacagtattaaatggttctcctgttaactttgcatatttcttatagtctgattcttttataaaaatggcgcttcttaacgactgttcctccgttttctttgtcgaaatattagtttttgaagctgctatactatgtttctttaatcctttgtcaatcatttgtatatgctgtgattcgttactattcccttgcttagaatggtaatgaaacgaaatcggtctctccattatccctttcgtcatggatgcgaagccaactaatgtccctattgcggaaaatgctacagtagaaataatggttacaataaagaacattcttgcgttatctctcatgcgatacgctaaatctgataacgtaataatattagtctgtgtccaataaaaacgtttactttttttacataatcgaataataaagacactcagctgcttgtacaacaaatacgtcccaataataactaccgttgtaacaggaatcatcataataaataccattgctccatgtgatagaagagctcctacatagccagcactaagcaatactactgctaatatggaagaaatgattgatgctttcggttcaggtttcgcctctgccgatcctctaaacaacttcataatcttatttttacgaatcattcctgcactaaacaatgatatgatcataaataaaataaaaaacataatactcgttacaacaattgctttcatcggtatgtaataggataaggagatatctagtttcaatatcatcggagcgacaaatagtaatacccctgaaaataacatacctgaaagaataccaaaaataattgcccctattccaatcataatattttcaaaaaagattagacgctttaattgatatttcgtcatacctaacatcattaaaatccctagttcacgctttctcgtttttaaaaacattcccatcgaatataaaataaagaagaatgtaaataagtaaataatagactgtgcaaaagacatacttacgaatacgtactgacctaattctcctgcacttaatgccggatgaaacgcaaaaaatgaatacacaaaaaaggccataattgcaaatgcactactcaaaaaataggctgagtatgtccgtctatttcgggttacattccgatatgctagttctctaatgttcatattacttctccgcccttctactatctatgtttttatattagtaaagtgcggaaataccttccatcgattcaaatgacaaaaaccttacatttttgaaaggtttaaaaaaattgcttatacgtagtactttatttataatgactacattcatattcatattcatacacacatcctattgtatattcgttaattttgcgaaataataaaggatagaagtatgtaccattatacatataaacttaattaccgctttaatatgaataggaggaaacataatgacattacaagaacagattatgaaagcattacatgttcagcctgtaattgatccaaaagttgaaattcgtaaacgagttgatttcttaaaggattatgtaaaaaaaacaggtgcaaaaggatttgtacttggtattagcggcggacaagactctacattagcaggacgcttagcacaacttgcagttgaagaaattcgtaacgaaggtggtaatgcaacgtttatcgccgtgcgtcttccttataaagtacaaaaagatgaagatgatgcacaattagcattacaattcattcaagcagatcaatctgttgcatttgatattgcttcaactgttgatgctttttcaaatcaatatgaaaacttattgggtgaatcattaacagatttcaataaaggtaacgtgaaagcacgtatccgtatggttactcaatatgcaattggtggacaaaaagggctacttgttatcggaacagatcacgctgcagaagctgtaacagggttctttacaaaattcggagatggtggtgcagatttattaccattaacgggattaacgaagcgccaaggacgtgcattattacaagagttaggtgcagacgagcgactttacttaaaaatgccaacagctgatttattagatgaaaaaccaggtcaagctgatgaaacagagttaggtattacttatgatcaattagatgattatttagaaggtaaagcagttccagctgacgttgcagagaaaattgaaaaacgttacacagtgagtgagcataaaagacaagtaccagcgtcaatgtttgatgattggtggaaataaattaaacataaaaaagaagctaatcttcatttagcttcttttttatatgttaacgatatacccctactcttttctccaataaatcttgcaggcaatcttcatgttgtttacaaaataacggtggcatgtcgtctaacgggaaaaacttcaaatccagcgtttcatcaccatctacttttttgtcacctccaactattgagaatgaaaagaacatcacaattgactgagccttgtctccatttggatatgattgaaaatattttgtatacactccaataagctcatttatttctacatcatacccggtttcttctttgatttctcggattgcagtttccgcagctgattctcctatctccattgcaccacctggaaatccccaagcgttaaagtctcctcttttttgcagtaatacttctccttctttattaaatacacaaccaccggcaaagtttaagaaaacataatcatgtcctactttttcacgtaattcttttatataattggccattctctttccccttttcatacctcttctatcgctatttcttatctttttcaagcaattcaatgattcgatctagcttctggttcatattaatcacgtggtgtttctttgcagcactgctttgtaatactcttctaataaacaaagtaaatgatatgaaaaacaaaacgataagtccgattactaaacaagtatatatcaatgtaaaaatattactttcgaacaagttcattccacattcacatccttatccatttattctatcacacaattcttaatattcaaaagcaatcaattaataaaaaaagcaccttttacagatgctttttcccattgcttaatacgtaaatgtaattgtcgctaatgaataacccgccaatgcactgtaaggcgctacttgataagacacacgctttgcaccttttggccaatttatttcatttaatactttctttatatcttgcatcgttccatccatggactgcttatatcgcacttctactttttctggcttggctgcaaactgttgctgcaactttttcttaaattcattataattttctgctccgtattctgcagataagtattgtaaatttgtttcttttaacatctgctcatatacgacagtttttgagctaccagcttttattttatttgttaattcaccaaaataacttgtagttgccgctggatatttgctacgatcccattcatgatctttacttaactgttcgtcagacatattaaaatatgagtaagttacacgccctgctttatctggtactggatcatcaaatgtagtatctaggtgataccatttgttttcaatgttcactaaattccacgcgtgagcttgtccatttcctgtgcctgttacaatatgattttgaatacctgcctcttttaacaactcatacgttaataatgtatatccttggcaaacggcagaacgattcgctaatgcttcatatgctgtatacgcttgataagacgtatcataagacacatgcttaacaacgtaatcgtgaatagcttttactttctcatgctcatccatccctagttttacaattgatccaacaattgatttcgcctgagcttttacatattgagtttgttcttttgattcacggtattttacttgcagtgtaaacgtatagtcccctggcattcctttaatagaatatctagtagacgctacattatattttacatactcatcagcatctacaattttattaaactcaccatacaattgatccataatatttctagcatttctatcttttgttttatatgtgattgtaatattctcttctcgattatcaatctgtttttttaattcttttctgaaatcatctaataactttacatctgattgtgctgtcactgtagtcggatttgtagctgcataagatacagatgacgcttgtaagcctcccattactatagttgaacaaagtgcggcagctgtcacatacttacttgtctttcccatcttgtcactccttatattctataactatacgaaaaagtatcgtatagtttcagagtatacaatactttttcgtataggtcatatgagattatgcatattaactaattcacataaaaaggttgttctttttaaaagaacaaccttttttcattagcatgtttgtaatacgcagcatgtattttcaaaacgttgatttttcaaatcttcattactaatacagaaatatagcatccctagttctccccaaaccatattacaatttttatgatctgaatcaatttggaataaaagagtcatttgctgcgggtctactcccatatattctcccgtctcatataacacttcttcttgtacagagaatggctcaccaaacatttgatggttatcgtagttatccggaattagctcttcaagtaattgcaagaaacgatctgaatcagcctcatcttcaatgaaaagttctggtaatttgtatgtcagttcaaaagtaattgcacactggttatatttcgcttgtacttcatttcctcttcgtaattgctctacaggaacatcataataaagtacacccccagcctctgttagcttcacattttcttcaaaataattttcaatgcaaaagaaatacagcatccccgtcttaggaagattgtgatccataccaacgttttgtaaatcacttaagttaaattgcgcgataaattgtagtggatttcctttatgctttggatattcaaataaagctggtaaatcaggaactcctcccattttcgaactacctatcgcaacagtttcctgctgctttggcacaacttttatacaaggaaatacagtattaataagttcctctttcaagtgtgttagttcatatttatcaattaatacttcaatttttttattcataaattctccttacatttacatacttatttatatcatagtacaaagattatacttcattctttacaaaatcaacaagcctccaaaaaacgggcttatccttcgtacgcgaacaagtttaaaaaagcatactatacattgttcctacaaacacgatagttctttagttcttccagtacattttcccctcgttcatttttatttttaatataaggaggaattccacatgggttacggatatagttgcggcggttacggcggtagctgtggtggttgtggttacggaggtttcgctttattaatcgttttattcatccttctaatcatcatcggagctagctgttggggcggctttgtaggctgctagtaaacttaaaaaccattgtaaaaaagcacgtacaatacgtgcttttttgccatttccaaatcttttatttgaaaggaagtatgtttaatgaagattgatggtgtttttgaaggaggcggtgtgcgcggtattgcgcatgttggggcaatttgcgcgttagccgaaaaaggttatgaatgggaacgtgtagctggaacatcagctggtgcaattatcgcggcacttttagctgcaggatattcttgttcagagctaaaaaccattataactgatatcgattataataaatttacgaagaaaacctttattgacaaaatcccctttatcggaaaaggactaagtgcatggactactctaggtatatactctaatgtatttatagaagaatggattgaagaattacttcgaaaaaaaggtgttcatttatttactgatttaccggatctaaacaaactcaaaatcatcgcttctgatattagtaatggtaaaatggttgtctttcctgacgacttaccaaactatggatttttaaattatcgcttctctatcgctaaagcggtaagaatgagtagtacaatccccttcttctttgaacccgtaaaatggagaactccaaaatggaagcagccttgttatatggttgacggaggaattctaagtaattatccaatttggatcttcgattcacctaccgctcctcgctggccgactttcggatttcattttgtaaaagatgagattcaagctgaccctgctcactataacgagcctatttctatgttcaaaggactatttaaaacaatgatgcaagctcatgatttacgtcatttagataaggaatcaaaagcaagaacaattacaattccaacaggaacgattacaagtactaattttgaactgacgaaggaagaaaaagactggctttacaattctggttataactctgctaataaatttttacaagcttggaactttaggcaatatattgatgagtatagaaaaggaaatcaagaccgaaagacaaatcgattttttcgtcaacttgactcataatattattactttgcgtataaatacgagaacgtttaacaacttaatagtaaataagcctagtaaattcttatattactagacttatttacttcctatataatctcatacattgtttaaggatacgttaagccttcggcttcttctgcagttataactatgtaacgatttcccgttcttaatcctaacagttctgctttttcaatcgcctcttgcttcgtctccgcataagcagctaaatattttcctccattgatcatttggcaaattacatattgtttcattactttctcctcttactttttcattagttgtgcaagtttttttatacctatttcaatttcttctaacgttgcgtatgaatacgataggcgcaaaaattgatttgcacttctatcatataaagtacctgggtttaataaaaccttttcttgcagagctttatcaaataaactgcgatatgaaatgggtacttttatatgtacccatatataaaacccgcctgttggttcatgccaagttgctatttcacgaagatatttatctaacattagtaacataaaatctcttcgttttttcaattcacttcttacaaatcgcaaatgctcatcatatagaccatttgtaaaccactctgctgcaatttgctgggatatagtgcttgaaccataatctgtttgcatctttatgtctgacaatctttgaattactggctcgggtccaacaatccatccaattcttaaacctggactaattactttggacatgcttccaatatgtagtacgattccatttttatcataggcctttaaaggtttcgaactaggtgcatcaaaccataagtcttgatacactgcgtcctctataataggtaatccaatttcattacatatttccatcacttctattcgtttcttcgcattcatactaaagttcgttggattatgaaaagacgggattgtatataaaatagaggcattaaattgcttcttatatttcttaatatatgatgtatgtaacccgctttcatccattgggattccaattaaacgtactcctgctgattgaaaaacattaagcgaatataaataggatggtttctctaataagattgatgcccctttcgaaagaagccccatagaaataagttgcagcgcttgaattgctcctgaaacaattaatatagagtcaggagatacatatacgccatgctcctttaagtattcggaaatcttttcccttaaataaagatttcctttcggctcttcatacccaagcgtcacatttgactttaaaaggttattcataatttctttcatctttttctcaggtaagagactcggcgcgagctcacctgttcctaaccgaattacatgtgggtaaaattcagcttgattaatctcttgaatagctgggagattcggataatgaagtcctgtttctacataagactgccaattaggcgggggtgcgtaagttgaaacattctcattattatttacaacaattgttcctttcctgccattcccttcaatatatcccttcgcaactagttcatcgaaagccattacaattgtgcttcgattcacaccaaatgtatgggccaaatctctttgtgaaggtaatttcgttccaacggtccattctccattaacgatcctttcttttatatacgtttctatttgtttatacagcggcgtcgctagagacatatccggtttccaaacgaatctttccatcatatcaccttatattctttttggttggtaacctccccaaccatatggatggatacaaattttcatttcttctatacaatatacactatcataatgaattaaaataggaggtaatatgatgagtgaagcaattattcatggtatcattcttgcatttggacttatcattccattaggtgtacaaaatgtttttgtctttaaccaaggtgcgagccaaccaaacatttggagggcagcccctgtagtattaactgcctctatatgtgatacgttactcatattgattgcagtgcaaggtgtctcccttgtactccttactttttcttggctaactaactcattatatataattggatttttctttctcctatacatgggctttgttatttggagaagtagcccttccaacgatgtaacacaagaaaaaagtatgcccttaaaaaagcaaatccttttcgcagcatcagtttcgttattaaatccacatgctattttagacacaatcggtgtaattggaacaaattctattcaatacataggaagtgaaaaatgggctttcacacttgcaactattatcgtttcttggatttggtttataagcttagctttagcggggaaatttctaaaaagactagactcaaccggaaagacaattttattattaaataaattttctggtctcatcatatggggtgtcgcactttatatgttaaaacaagttatttattcttaatgaacgaaagagaattgcatgttactcaaaacatcatgcaattctcttacaaattatgaagtaggttccggtttctgttttaccgcctttgcatcctttgctggtttaatccaaatgattgctatgacagcaccaatggcagcgaaaatactagtcaaataaaacacttcatggtccgcccctttcatgaaaaaagaatataaaggtggtccagctgctacaccgataaatcgcattgaactgtaaaatgacgtaactgttcccctttgctccttttcaattccttgtgtaatgagggcatctaaacatgggagtgccataccaatccctatccccataataacgagacaaagaagtagtaaataaatcccttttataaataaaggaatgatgactgatgcagctgccattaaaaacccaatatagatacacttcttcataacattttgattatctccaatttttttaccggccatatatgaactaagtgacagtacaagtaacgggatagcaagcacacaccctttccatataccatgaatgtcatactttgattccagtatagtcgacaaataaaagagaattccgaataaaataagcataataattgcacctaatgcaaaaatggcaattaaccatcttcctttttctcgaaacgtagacagaatagattttataaactctttaagtggtggtacttctccttcttgtttctttgcctttactagaacaagtaataaaacaattgatactacgcataaaattggaatcgcccaaaatggtaagaaccatacaacggcagcaagagcagaccctaaaatagggctcagcactttcccaaatgtattggatgtttctatgattcctaaacctgtactaacttgtttttcgtctttgtataaatcaccaacacacggtataacaactggcattgcaccagcagcaccaataccttgaatcgctctaccaatcaatatccaattgtagggattatcaactttccaagatacccaaccagttatcgctcctcctatagctgcaatcagcaaactcggaaccattaccatctttcgtccccatctatctgataaataaccagcaatcggtataagtagaatggctacgatagagtaaattgtaataatcatggatacttgaaacgatgaaatatgtaatttcttttcaatagtcggcagaattgggatgagcattgaattccctaatgtcataacaagtggaactgatgcaagcgcaattaaacaacagttttctttttttaacatgttggcttcgaaacctttcatcatatatttcttaccatataatagccccgctggaacgtaacttttcattccaccagggctattacatctttactacttcccattcacaacaaaagaaattggggaaattatagtattattcctattctttgaatccagttcacaatatatccataccaattaattgaaaaaaaagaaaggaagaatccttcctttctcctataaccttctacaattagcgagtatatccgccaccaagttgttgttctgccatcgctacaaggcgttttgtaatttcaccgcctacagaaccgtttgcacgtgaagaagtatcagcgccaagttgtacaccaaactcttgtgcaatttcatatttcatttgatctaaagctgcttgtgctccatgtgatgctaattgattagaattacgatttctagccattaccaatcacctccttatttatatataaattgtgttaaattcaaattaaaatacatggaaatttttggttattttttaccataaaaaaagagcctctaaaacgagactctcacatcatttcacattacgaagttactacttctaattttctatttattaatactttcatttcttcttttaatatctcttttgcattatgtccaaaccattctaaggaagcaaaaagatccgtacctctcacttcctgaataatctcatcataatttacaataccttcaaataacggaaccataccaatacgacttcctgctgcagcatatacattattaggttcaaacacatgcaaataatccgctgaagatatattcttaaaatggtaatgtagtgtccacggctttaatcgatggaaactgtctattggatctgcgccagactcccatatatggagaaaatcaagatttatttttaaattcggatgatttacttcttctaatagttctatagtagaaggcaatgtgtctgttagtgtattgggatgtgtttctaacagcacatacatattgtgctgagcaaacacatcacaaatcttacgtattcgctttacatactcttttctctcttgttccgagaagtccttgctccctttttgcccagcaaacgtgcgaattttattcgtattaaaccaattagctagtactacaagttgttcacttttctctatcgttttttcaaaatctgctgataatgatatatctaagtaatcacttatcatcgtaatttctaagtttttatcctttagaaaagtcaattctcgttctgtcgtttcgcgttcttgtatatacaaattttgtgcatgagtcccccacaattcaattccttcaaaaccgttttcatatgcaaattgaacaatatcagtaaatgaaattaattgatgacgaaatgaaatggtacatagcgaatatttcatagcattaaactcccctatcttaaattcagttagcttattaaaaagttgcgacagactgatttgttttcatacctttccatgatagaaactgtctctctaattccttcttaatttgcagttcaattgcattcatttcatccagtttttcaataatcgatactagcatacctttattattcgtcattgccattttaattgcacgatactgtacatttgtaaatccttgtacaatatcctctacccgatcacaccaataatcaaattcttgctccgaatattgcaacgtttcacggaagtatgcaaaggcatgctcataactatatttacgaattgcaagtactggtatttgttttactgctgctacaagaccagaaagcgcatatccttcttcctcatttgccatttttacaattaaatttttcagttccatagtcagttcattgtcgttctttttgaatgtttctgtgaaataactagctactgtttcttgcgttggctccccaattccttctatatcaatgaaataacctccaccaaatgggttatcttgaatagagtgaagtactttttctctttccatatttccttcccaacgaaaatcaggatctagcatgaaccactcttcttctttctctgtttttgatatcattaaataatgtggaaacggtttttgatgaaatttattttccctctctggtaatagagacatatcaaccattacaatgacataacgattttccggcttgttttctactaattctaaaaacgtttctacattgctatctttatcttttgcatgatcataccattcgtttactttaataccgtacaatttttcaaaccaaagtaaataatgatcatggttaatgttttcagagtgatatgaaataattccgccttctgttatatcaaaatctccatcccatagtccaaaataaaatggacgaaaatcaatgtcgctacgcctttttataatttcacaaaaacaactcactaaacagtgcacttttattgaagtcatactctcatccactttcctaaaggttagttattcacatttacttcttgtaactcctccataaaatcaagcaaagatcctacagtaagaaatgcctttggatctacctcatcctctggaacgcatagctttatatccatttctatgtatacaataagctgtaacatcattaccgaatctatatataaatcttgatttaagcgcatcgtttcttctaaatgcgttacatttttcagttccattttttctatcataatttttaacacggcattctttaacgcttcccgtctcatgttgtaacctctcccatctctagtaactttctacttacttttccagttttatttttaggaatttcatttacactttcaatttcatggggaactttataagaaggtaagtgctgaatacaccattctcttatttgtactggatcaacatgagagatcactttcgctttaactatttcgcccatgacaggatgtttccctcgatatacaattgcctcttgaacaccttccaatcgaagcatcgtttcttctacctctataggaaagacttttaatcccgaaacattaattacatcgtccatacgccccataaaatgaatgccacgctcagatttataccctaaatctttcgtgaagatttccttatcattcattttcacgacgatttcttccggtgcattttcatctgaacctatgcttatactcgcatgaggtagagggtttcctaaatctaaatggctcttcatatcatgacatatactaatacaacctgcttcagaacaaccgtattgctgcatcatatatgttgtcatttcttttagtttataaaatagtgcttctggcaagggcgatcctgatgtcataattttatgaaactggaacgttcctaatggaaaactccccataatgtgtaacataagtggtactgcatatataatatgtttctctgtattgcgaactatatttaatgcgaatttaggatttttattcgtaatgattacaggctggctccccctcttaattgctgataaagtaccacatattagtccgtatgaatgtgaaacaggagccataacgattggcacttcatctacttcacagtttaaagcttcattataagcggtaatttccgtatcaacttccgtccatgctctacgaattagtttcggttcccctgtagttccagaactatattgcaataaagaaggctcttctagtaaaaagttccctacttctaattttgtaaaatcgccatattctccatataaaattcctacacaatttgcacgctttgccattttaatagctgtttcttttggtgtatcttcatgtataagtaatactgatgatttcttttcttttaagaaaaacacaatcgtaataatatcgaatggatctttcagacaaagtgcaaatctatttccttctgcttctttaaattgttccatttcctcataaacttgtaatctcgattcaaaatcacttttgctatactcttgtttattaacgattagcataatttccccctgtaacagctgatttttgtttcataagttgtcttactctatacaatggatttggaacttcatgaacaagcgattccagatccatatataatcgacgtttcgttaattgttcagcatagaatgtaggtgcatataattgaatattttcaaatctacctttcaaatgtggatatattcttaaatgattttcaatttcttcaacaaccatcatccaaaaatgttcttctttcaatccatattcatccgcaagtacgaatgctaattctcctaaattaaacaggaatagtgcatctaacaccatctcttgcaaacattcaatgcgatccatttcaaagaaatcattcatttttccattcgcatatgttttatgcattttagtaaagtcgggacatttgtcaaccgttttcaaatatggacgataaaactcaagcccttcatgaaaatcctttaacgcaatacgaacaggcaccccttctttatggactagaatcatattttgtccatgtgattccagtgcgatgccatgctctacaacaagatgtataactggtattatcgctttttgaataagtaattgtagccaatccttcattccatatttattcaaccacgcatcaataattggtgtaccatttttctctttagcgtataaaccattaaaaggaattgcatcttcttgtgcatctaaatacttatgaatgctttcgcgccaaatacatcctaatgaaccatatatagcttttttattcgtgtcatacgttacactggaaaactcatttaacaagattaaacgtgcttcatccattaaataggcgtcattacttacaacatcatttaaccaatttgatattgctggtgcactcacaacagagtatggtttcagcgtacgaagtgttgaagtgttgagtaaattcatcgataatttaacgtacggtttctttggactcgtaatatttcttaatgttctcattgactgttgcgcgcaataatcgtcctcagatgttcctaaataaataataaatttcccctgtatatgatccgcataatttgaaatgatgaaattcacccactgccatgggtgaacaggtataaacacgtactgttttggattacatcccttattacgaattcgttccataaactcttctaatttacgatcgccaatctcctcttttaaaaggttgttatacatcacttcattctcataacctataaatgctaacttaaatatgtacattaacgcttgaataaatatgtacattttcagaagactacattgataatcttaaaaatttctggaatgtttcagaaacaaagttagttcaatttatattagaaaatgatcaaaattattatgcatgggtaccaaaagaagcaagtatcccaaatatgtatgaagtaaagatagagagtgtcgatgtagaggaagttctataacgaacaaatcgaaatgttttttattatatgtaatattagaatgcattttactagttaattgaaaacaatgcatgcgtggcagaaaaaaggatgtatcgttactaaaaattagagggaaagaagggtgttggattgagttaagcacctcattgtcaatatacgacaataggtgcttttttgcgtgcaatgaagaaaaaataaaagattcattttcactctatttcatctttgaaatacatgttataatttggaaaaaatatattcttaatttttagataattgaaaggtggtagattactatatgagtacattaaagaaaattactaacaatatttcgaaagttattataggaaaaaacgaatcgatagaactagcagccattgctctaatagcaagggggcatattttattagaagatgtacctggaacaggaaaaacaacgttagcgaaaagcttggctaaaagtgtggacgctaaatttcaaagaatacaatttacagcggatactttgccgggagatgttattggtcttgaatattttgatgtgaaggaatccgaatttaaaacgaggttgggtcctatttttgcaaatatagtagtagtagacgaaataaatcgtgctgtaccgagaacgcaatcttcgttactggaagtgatggaagaacgtactgttacgattgcgaaacagacacattcattaccagaaccctttttagtaattgcaacgcaaaatcctcttgaatccgccggtacatttcctttacctgatgctcagttagatcgatttttacttactatacgccaaggctatcctacaagagaagcagaaaaggagatgatgaatcgtttccaaacaaatgatccgttagaaacgttacattccattatttcaactgaagaaattattacagtgcaaaagcgtgcaagagaagtgttagtagggaatgatgtgcaagattatctccttgaaattattgaagcaactcgtaaccatgagttaattgaaattggtgtaagccctcggggaacgttggcatttatgagagcaattcaagcacgggcaatattaaatgaaagagattactgtacgccagatgatattaagacgctcgctgcatccgtttgtgctcatcgtttaacgttaacgattgagggagagatgaaaacgacgaaagaacaaattatgaaagaaattcttcatacgattagtgtgctagtggagaatgtacgatgaatcaacagcttgtgtatacacctttagcggagcctttcgtaatgggggttatgtcagttgtagccgttattttaagtgtattttcaagcaatctactgtttttatctctcgtatttttatatgtaattttaataggtgctatgcatgtatatatacgtaaagtatctcgtgttgaatgggaatacagtcaagggagttcgaatgtttttataggtgaaacgaatatgtgcaaaatgaaaatttcaaacaagtcgatatttcctattcttaatatcgtatttcgatttaaatgtgaaaataagctaacttggaatcatgatgaaataaacaaaaattatagtacaggttcaaattattatatgaattttaatttaaaaggaagggagtcagtttcatttgatttgcaagctgtagcgttaaaaagaggcatcgcgaaatgggaagaagttgaaattgtcattacggatccctttggattcataacgaaccatataacgtataaacaagttggaacgccgtcttatttagttttaccagctgttccgaaaatgcaagttcctgaattgcaagaatggtcacgagggtttcgaaaagcgatgtcatcccccttatatgatgaaacgaaagtaatgggagtgaagtcgtatgaaaatgaagattttcgttctatccactggagtgcaacagcgaaaacagggacgataaccgcgaaaaagtacgagcgaacacaatcagataaatatgcgatatatctcaacttgcaaaataaaagcggtatttctttgcgaaatgatacagaggaactcattgaattaacggcaggcatatgtaaacaactgcttatgcaaaactgttcatttgaagtatggatcaatagcgtaaaagataacggtttgctacatataaagaacggtcataaccgaaaacatttgcaaaatgtattaaaagtacttgcctcaatatcggaccaagatactcctgtatcgtctacttatttttacacagcaggctttcggcgaaaagaattggatgcagttcctttaattcttggtacttccccaaagaaatacagtagaacgaataaatgggtcgtaattaaagaataagaaggggtttatgttatggctaataaagagcgacatatgaaggtgaaggtttggagtattagagttttcatgatacttttctttacggttagtgcgataacgttatcacaaggtgttgtgcatgtacaagacatagtaaaagggcttttttctagtaagacggagacaatatcggaaagaaattatgattttactagtttagatgaacagtttgatgaacctgaaagaattatagatgaagaaacaggagttgtagatacaagaacaaaaatagataggaaaattccactttttgtacgaaaaaattcatggactgatgtgttttctgttctttcaaatgcatggattagtgtcgttttttatgtaattattgcagtggtcattctctatgctttttataaattaacgaggagaaaggtaacgaaattagaaatagaacaggataaacaatcgataacaaaagaaaatatggatagaaccgaaaagaacaagaaagtgaagcatcagtttgaacagccgttacttaaagataagataaggcaaacgttagtggaatgggaaagaacattaccgtttcatgaacagagaaggtcatatgaaacgatgcaacaatggttaagcagaatttgtagaacgcaagatattattccgatatatgagtctgtccgatatggagaaaagacgtatacggagttagatgtagagaagactgtacgatggatagagcgagacgggaaggcgtgacattaatataagtaaatgaaattaactgtaaattaatttcatttacttatatttaattacatggtaatgtatacttacttttttatatctctaccaatgtaaaaaggtagccttagtaaagtattgctcgttgaattttttttgaggttatcttcacttcatcaatatagaatgaaaaagtgatgaatccattacgggtatcatgtaaataaaaaatataatttatatttaaatttttgtgagggtgtgaaaatagaatgaaaccggtattgaaaaacatactcctttcctttattttttctgcagcagggatgtgttggttcctatttatgttagttagaggagacggagattggttattgtcttgggtaggtgtattaatggcctttttatctttatacacgttaatagatttatattgtaagtatacatacgataaaaaattaagtgaattgtttatcaaagcaacaattactacctttagttttgcagtattgggaatcacatttggtattgtacacgagctattacagccatggagtcttagtttaatggtttggtattggttgttagtgttacttttatttgtaacgaccataatattattagtttttgtattatttgttaatcgtaaaaattataatattcctgggagatatagaatacttatactgtttaatctatttcttacgttagccccagtgctgtggccattactacttactcttatcgggaatggcatgaacgctagtgcaggatggtaaaagtgaatgaactaaaaagttgatatagggttttaagtatgtaagagaacgtgttttgataaattgaaaacacgttctttttttattttcatacattactttttctcatctgggcgtctaattttgaaagtaagtatttcgtaaggaatggataagaaaaaagagagatttattatataagatgaaagtgtagcttgaatcaatacgatatggatagaggagagaaccttatgaaaaaatgtacttcaataaagttaggaagttttgcagttttaatagcgggtactactcttttcgcaccaggttttaatgtgaaagcagagtctactcaaaatatttctagtccgtcacaagcacaggatcaaaagaatcggaatagttggaaacaaataatgcaggaaacagtacagcttggaacaccaggggtattagcgagggcatcaaacaatggaaagattagtagttatactgcaggcgtcgcggatttaaatagtaagaaaccaatgaaatcggattatcgttttcggattggaagtgtgacgaagacttttactgctacgactgttcttcaattagtaggagaaaatcgtgtacaacttgacgattctattgaaaagtggctacctggcctcattcaaggaaatggatatgatggcaatcaaattacgatacgtcaacttttgaaccatacaagtggtatagctgaatatttaaagtcaaaagacgctgacattatgaattcgaaaaaaacgtatacagcagaagaaatagtggaaatagggcttgctctacctccagatttttcgccaggtaaaggttggtcgtattcaaacacgggatacgtaatactaggaatgcttattgaaaaaataactggtaatagttatgcggaagaaattgaaaagcgaattattgaacctttggacttgttaaatacgtttttaccaggtaattcaccagtcatcccaggaaagaatcatgctcgagggtatatgaaaattgacgaaacaagtgaattgaaagacatgacgtattataatccgagtttagctaattcagcgggagatatgatttcagatgcggacgatttaaataagttcttttcatctttgctcggtggtaagttattgaaagaacgcgagctaaaagaaatgcttactacagttccaatagaaggaaaagatcttggtgatggatatggccttgggatctatgagacgaaacttccaaacggtgtttcagtttggggtcacggaggagcaattcctgggtttatgacttttgctggcggagtaattggaggcaagcatacatttgctgtcaatgttaactctttaggtgcggctggtattcttacacagtttaataaaatgatgcaaattgaatttaagaaataaatgaaaagaatgtaaatgggatcctgttttaagggcagtattagtattcatagtatggcatcaagtgtaattcaaacttatagtctggtggtaaaaaaggatgtcggttacacgacatccttttttattgagaatcaaagaggtgtgttttgaattttgaaaattgttatttttgcaatcattccatataatgaaaggtataggggatatacaggggagttatgaatggagaatactttagtttgttaattgtttttattttaataaataaaagtaaattgatttggagtgaaattcattgggagaaaatcagtttagatggagtaacacacaattacgagaacatgttgaagtaatagatggtaaaagaagtccgcacattttatgtaagaacgcaacttatttaaattcctatatgcgcgagtggatgcaagcaaatatttggatctatgatgaccggattgtttatgtaggggaaaagctgccagtgcaactgcatgaatgtgaagtcattgattgtgatggaaagtatgtagttccaagttacatagaacctcatgcacatccgtatcaattatataatcctgaaactttagcgaatcatgcgatgcagtttgggacaacaacttttattaatgataatttaactttatttttcacattacaacgtgaagaagcatttcgtttattagatgaatttgaaaagattccagcaagtatgtattggtggtgtcgttttgatggacaaactgaattgcaaaacggggaaactttatttaatcgtgaagaaataatagaatggcttaagcataaagcagttcttcaaggcggcgaactaacagcgtggccaaaactattacatggcgatgatgaaatgttaacttggatgcaggaaacgaagcgattgcagaagaaagtagaaggacattttccaggtgcatctgaaacgactttagcgaagttaaaactgttaggtacagattgtgatcatgaagcgatgacagggcaggaagctttcactcgtcttatgcaaggttacactgtttccctaagaaattcttcaatccgcccagatttagaagttttactgaaagaattgttggaactaggcgtaaagcagtttgatagattcttttttacaacagacggctcacatccttcgttttatgagaatggaatgacaaacgttatgatttctaccgcgataaaacaaggagtgccagtaatagatgcatacgatatggcaagttataatattgctcgttattataatatggaacatgtacatggttcgattgcgacaggtagaattgctaatatcaatattttagaaagtaaagaaaacccagtaccaattagtgtccttgcaaaggggaaatgggtgaagcgtgacggtgtaaatacacatgaggcattacatatagactggagtaaacataaagtaactccattatcattagattggtcaatagaaaaagaggatatgattttctctaataaaacggggatacacttattaaataacgttattacaaaaccatacactagtgaaatcaatatagactgtgatgaattgtccacagatcatgatgaatgtttccttatgatgattgcccgtgatggcagttggcaagtgaatacagctgtgaaaggttttgcgaaaaaactaggtgggcttgctagctcttattctggtacaggtgacatcattcttatcggaaaaagaaaagaagatatgctaacagcttttcgtagagtaaaagagctcggtggtggaatggtcatagtagaaaacaatgaagtgttacacgaaatagcattaccattgctcgggattatgtctaatttaaaaatgagagaattaatacaggaagagaaacagatggtgaaattactacaagagcgtggctacgcgtatgatgatccagcatttacaattttattcttttctgcgacgcacttgccttttatacgagtaacacctataggattatatgatgtgaaaagtagtaaggtagttgccccgcccgtgaatttgataaagcaatattaaaaggaaagatcctataaaaattttattttataggatctttcttattattagcataagaatattgtaagcctcaaatgatatagtatctaaatcatttgaggtgatatgtaaatatgaaaaaaatattttacattttaagcgtatttattctgtgtgtatcgatacaacacgttgtacattcccaatcagatgcaccagagttatcttcggattgtctcgaagaaagaaaagttagagatgaaaagtatgtgaagaatataatacaggacattaaatccacatttaatttaaatattgatgaacatagtttttgggaagtaagtaaaagagatttggaggctgcccatttgatgtatggtggaaaggaaaatgattcttattataattcgctaactaaaatttatgacagtggtagatttagcgaacagcccagcctatttgtgagggcgcaagaagcatttttactttataaagaacaagataatatcaatgtaatgaaaagcctaaaactagacgttgaaaaaggggaatggctcgttataaaaacgaaaaagaagaaagggaaaaaagtgaaattcaagccgttgcaatgtgaaaaagattatatgaaaaagagaaatgaataacaaaatacttattcatgctattttattcaacgatattttgctgttgatatgaaataacaaaggtaaacgaacatattagctttatggaatatgtttgtttacctttgtttgagagatttaaaaattgggatgttgttagttgaaatttatttactggctaatgagcttatagcattcaatgaatttgttcttcataaacattagattttgtgtcaaatgatttatacattgccgaatcacctatgtatattttattctacagtatttataaaaaatgttggctattcataagaaatataattggcacagtttttgcttgtattacatgtaaggaagggagattgtatgtaaggaatctgtactcgtaatagtataaaacaagctactattgcattattaatcatatttgtatttatggcggaactgtaaatacatacaaataagtggttttttggttttaaaattctgaattttcttttaaattgttagggggcaatggtatggttaaatattcgaaaatttctaagtggattcttggtgtgggactagtgacgataacatgtaatggtttgcaaattcaagcagagacaaaagagaaaaatgtgaagaacgtattacaaatggagccggtaggaatacagaaatctgttgatgaattggcgcacccttcaaaagtacaagaaaatgcatcttttacaaaacgattaaaattagcggatttatcgcagcgtccactagcaccaaccgataatattaaaccgttagctgaagaaaaaaagtattcaatggctgagttaaatcaattaaataacaaacaattaactgatcttcttgtgacaattaaatggtatcaaattccggaattatttcagtttaatagtgatagtcttaaattctatcaagatgatagtcgaatgcaagcaattattaataaactagcagaacaaggacaaacttatacgaaagatgattcaaaaggaattgaaacattagtagaagctctacgtgcagcattttatttaggtttttaccatgatgaattaagcaaactaaatgagcgtagctaccatgataaatgtttaccagctttaaaaacaattgcaaaaaatccaaatttcaaacttggtacatcagaacaaaataaagtaattgcatcatatggaaaattaattggaaatgcatcagcagatgttgaaacggttttatatgcaggtgaaatttttaaacaatataacgataatcttgcaactttcattgaagaccgaacaaaaggagacgctatatatgagttgatgaagggaattgactttgatattcagacggatatgtacacgactggaaaagagccaaaagatacgatgtggtatcgaaatatcgataactttattaatgaaataaatcgttttgcactacttggtacagtaacaaataaaaacggatggttaattaataatggaatttactatgctggccgattgggcaagcttcatagcacgccgacaaaaggacaacaagttgctacagatgcaatgcgaatttatccatatttaggagagcaatactttgttgcggcagaacaaattactacaaattatggaggaatagatgcgaatggaaaaactgtaaatttagatcaaattcgagaagagggtaaaaagaaatatttaccgaaaacgtatacgtttgatgatggtgcaattgtctttaaagctggggataaagttagcgaagagaaaattaaacgtctatactgggcggcaaaagaagtgcgttctcaattttatcgtacagttggtagcgataaaccacttgaaagtggacatgctgatgatgtgttaacgatggttatttataatagcccagatgagtatcaatttaatcgtcaactgtacggatatgaaacgaataatggtgggatttatattgaagggacagggactttctttacatatgaacgtacaccagagcaaagtatttatagtctggaagaattgttccgccatgaatttacgcactacttacagggaaggtacgaagttcagggattatggggccaaggggaaatgtatcaaaatgaacgtttaacatggtttgaagaagggaatgcagagttctttgcaggtgcaacgcgattagatagtgtagtaccacgaaaaagtataattggtgggttatctaatgatcctacaaaacgttatacagcatcacaaacattaaatgcgaaatatggaacgtgggatttttataattattcgtttgcactacaatcatatatgtataataagcgcccagaaatgttcgataaagtacatgatttaattcgcgcaaatgatgtttcaagttacgatgaataccgtgctacattaagcaaagataataagttaaatgaagaatatcaatcttatatgcaaatgcttattgataatcgtgataagtatacaattccacaagtatcagatgagtatttaactcagcatgatccaaaatcgctttcggacgttacttcagatattacgaatgaagcgaaactaaaagatgtgaaagtaacaaagaataaatcacaattctttaatacatttacactacaggggacatatacaggaagtgcggctaaaggagaagttgaggactggaaagtgatgaatgaagcaacaaatgatatgttgaaacgcctttcaggaaaagagtggactggatataaaacattgactgcttattttgtaaattaccgtgtaaataatgctgggcaatttgaatatgatgttgtgtttagcggagtgaatacggaagaaggtacggctgtagaaaaagaaccaaataattcatttgaaacagcaaacccactatctttgaatattttgttaagaggaaccttgagcgatcaagatcagggggataaatttgttattgatgtaaaggatcaaaaagatttacaaatttcggttacgaacgaacaaaatcttggattgaactgggtattatattctgaatcagatctaaataattatgtagcttatgcaacaaaacgtgatggaaacaaattgcttggaaattataatgcaaagccagggaaatattacttaagtgtatataagtatggtggtggaacagggaattatacggtacaagtaaaatagtttactatagtttgttttgaaaggctacttatcgcattttgtagcgaaataaagtagtttaatgttaaacattaaactacttcaatatatccctgttctaattatagaacagggatatattggctttacatttttaaattaaataatctcattggattttgataagaaaataattaatatagatttgaattctcattcgtaaagcatgttttaatcttcttaatgctctttcatttttgtctcaatgtttgttttcaaatcagtggatactcgattgaaataccccaaaacgatcttcctaatatcatcggatataactttcaaatcactagctaagttttcagcgagatgttctttttctattggctgtaacttcgtataaaattcactagcctgcgtaaagttatcctgtttcgttatagaagttctttcaagtttaccttcaacgtaccttccttcaccggttgtaatttgattagcaggtgtccaatcttgctgctggttaatcgttaatttacgaaattcgggaccaattcttcttctttgtgaatcactgtaaatgttagcgcgcccttgcagcattttatcatctgatagttctgcaccatccagtaaattagaaggggagaatgcgactttttctacttgttccataaaattttcaggatttttatttaataccattttcccgactggtatgagaggatacgtttgttcatcccatacttttgtgtcatctaaaggatcataagaaaggtgcgcttcatctttcggatccatgagctggacgtataaaccatactccactggtttaccattttcaatagcatcatataaatctttcccgctataatcaggattttcggcagctagtttaattgcttctttactagtaatgtactgtacaccttcaaacgggtaccaatgatactttacatactttcgattaccttccgcatttctccatacatatgtattaacactatgtcctggaatgtggcgaagacttttggccgtaccattattagagtataaacggacaacaaaatgaatagattcaggtgctttagcgacaaaactccaaaatctattagggtctattaagttatttttaggtgaaggcaataatgcttgaatcgtttcagggaaacgcatcggatcacggacagaaaaaacaggaatgtgattacataaaaggtcaaaaatgccttcttttgtataaaattttgtagaaaaaccgcgtacatttctagcagtatccggtgttcctttcgtactaacagctaacgaaaatcgcaccataacaggaactttctcattagaattttgtaaaaaacttaatttagtatgttcagacatcgaatatatcgtttgaaaataaccgaacgcaccaaatccttttacatgaacaggtctttctaaaattttttcatgaataaattcttgtaacgtctcgtgaagtacactatcttgctctagaacaggtccacgtgaaccaactgtttgtgagtggagtgtagcttgttcattacgttctctatcttcattaaagtcattccctagtaaagattgcccctgtttatcatagttttcattcatcgatatagcctccaaatttatttcgtctattgttactaaatatgattttataaccttgattatgtatgacatgcaaagtagtaacagaccgctagatgaaaaaaatgcacatgtagtggacctgttgaaatagaagaaattatggaaaaatgaatatcgtgaagaaaattactattaaaattttaatctgaaaaataaatttatagagaataaacataaataaacagggaaaataactaggaggaatttaacatgtcggattggtttcaattagataaggaatatatgatgtctacgtattgtcgtacgaaggttgcaatagaaagaggagaagggtgcaagctttatgatgtggatggtaaagcgtatatagacctattttctggcgtcggagtaaacgtattagggtataatcatccgaaaattgtgcaaacaacaatggaacaagttacaaaatcgttgcatctgccgtttcattttttaaacccagttgcaattgagtatgctaagaaattagtggattgctcattaaaaaacggaaaggtcttttttacaaactcaggtacggaagcgacagaaacgacgttgaaattaattgataaatatagagctaatatgaatgaagaatgtgaaggaattgtagtgctaaagaatagtttccatgggcgtacgttaggggcactacattttacgagacaagaaagtgtatatcaaaatttccctgaaacatcgattcctgtatacgaagtagagcgcgaaaatatagaccaattagaagagactattattaaagaaaacccaattgcgattatgctagagcctgtattaggaagtggggggatttatcctttatcaagtgaatatttgcatggtattcaatatttatgtgaaaaatataatgtacttcttgtcgttgatgaagttcaaagtggtatggggagaaccgggaaactgtttgcgtatcaaaattttaatattacaccggacattattcaaattggtaaaggagcaggaggcgggataccgctagggggaattattgtaggtgaaaagttatgtgatgtattttcaccaggagatcacgggacaacatttgctcattcatcaatgggaacagctttaggtttaactgtattaaatacattacttgatgaggggttaatgcaagaagcttatgaaacgtcactatatttgaatgacaaactgcaagacattcagaaagaaaattcttattatattcaggaagtgcgtcatgctggcatgatgtttggaattagtctgaatgatacgaatgaaaatgtgaagaaattacaggttgagctaatgaataaaggaatgttagtcgatgtaacacaagggaatattattcgattacttccgccgtatattattacaaaagaggaaattgatgcatttattaatcagtttatttcttgtctggttaaagtagctgttttaacaattgtttaaaaataaatttcaagttctactcttcagaatacattcttttttgaattgtaatttatgaaaaaaaaactatcttttatacagatagtttttttttcataaatatatcagtagctatgaaatattcttaattatttcttcagttgtgattggtaaaatagtatgtcttcatctaccaaaaaaatgtgtctaaaaggggaataatttgagttattgatttgaattttaaaagttttatttcagaagcattattttatttagtaatttatatattactagacgacatttgtctggtaaaaagccaaaaaataagaatgctagaacattttcaaaaaaataacatacgaatataaatataatgagaatgaggtgatatgttggaatacaaggatattcaattcacgtccttacaaatgagaactgatagatttgggtgggccggtattcaatatacaaataaaaagcaagctattttatttactcgaaatggaggggaagaatgggatattgtcaatcctcttaattctataatattatccatatatccgataaactctcgaagctcttgggcatatggtttaacaaaaacgaatgataatctagtgcctgctatattttatacagttaacagaggggaaaaatggagtgagtttattttaccaattgaagaaaattgggagaaatcgactgatgttcaggtacaattgcatgccacgaatatggatagtatatggattataatatctagaaaactcgcatcgaataaatttgagcataatttgtattatttgaaaactaaaggacaagtatggaaggtaataagaaaaataaatattagtgatagtatatcaggtgtaacatttataaataggttagttggttttatttctctacaaaaaaaatataaagaatcaacgatatataaaacgatagatggtggtagaacttggcaccctataaaaaacaatcagaatattcaagaggttaataacgggaattccatggcttataaaacgatctataaaaataacttgttagcgataccaacaaaaacgaatgataatatattttttataaattattcatttgataaaggtaatacatggcatactccaaatcgaaaaataaacactagtaaagttgctatttcttttttcagtgcacattatggttgggttataaatagtgagaacggagatgtgtatcaagtaaagaaaaaagcatcggaatggataaaattatcaagtaatccgttgttaaaaaatgtattttgtttacattttataaatgagcatagtggctgggcttgtagtaaagaagaaatatttactacaacagataggggtataacctggaagaaagtgttatataaaattaatcatattgataaattaacttaaaaaagagtcctaaaaaattaggactttttttatgatttttaaaaggcgagagttgtaatatacataattagaagggggaaggataaaagcgtaaagcatatattttcaaaaaaatggacgtttgtttttacacagtacaatccatttttgaatatattgataaagtagcaaatttagagggaatagtaatacttaatattttatgttcatattaatgatgccacatggtgtgtaaaaaagggggattgtaatgagatcattaacagttattatttcgtatagtgatagagcacaaatattagaagatttaattaaaaatgtatgggagctaaacccaattgaaattattgttatgctccctaatgatagaagtaaattatatgaaatagcaaagaaatatagatgccgaattgttttgacagagaaatatagtgggcattatcgcggatatgaagcttttataaaggaagcaagaggagatgctttattatttttagatggtaaattttcattatctacagatgaaatgaagggatttattgaaccaattgttacaaatcaggctgatgtaattttgaataaaatagataagtttatagaaatagataaatgtccgaatgtggatattgtatggagaaaaatgttaaatgaaattttaggtcggccagatttaaaatgcaattcaatgctttcattaccatatgtgcttacgaaggaagtattggttaatatcggttgtgattttatagaagatgccattctttctcatatcaagattgtgagtcaagggtggcggattagcgatcaatatgcaataaacactttatctaaagatgaaactttagaagaaaaaggatatttaataaaaaaggaactatcaaaaaatgaaaaagagaaagtgaaaaaatatctaattggaatatctaaagggatagaggaaaaagggagaagaggagggtttactgatgcaggaaaaagaagagatattattcaaaggttaggtgaattaaaacaatacccttgttatcatcaaggttttgggatgcattcttcaatttatggtggaaagcaactttctgtaattataccggtgcaggatgaagaagaaactatagaacaagtgatacttgagactagaaaaatagaaccgctagaaattattgttgttgtaaatgggtcaacagataataccgccaatattgctaaaagtcttggtgctactgttattaaatataacgagcgacttggccataatgttggacgtgcaattggggcacttgaagcgataggagatattctcttatttattgatggtgattttagtatttcaggaagtgatttgcattgctttacgcaagcagtctcagatggtgtagatatagcattaaataatctaaatccaagtttaaatccgcctttttatattgttgatattgtaaagtatatgcttaatttagcatataatcgtcctgaattaagtaatggttcgttagtagctattccacatgcaatgagtagatcatgtttagatgcaataggatgggaaactttattatgccctagccttgctcaagtgaaagctatattacaaggatacagagtagagtgtgtgcactatgtagatgttgtaaagccgaatagaattcgtttaaaagaacatgtagattacactgggcatcctccagcagtattaagaattctgggtgatcatattgaagcactctcctacttaatagaaaagttagattagggcaatgagttatataagagaattggtgaggtgtaaaaatgaagaaattactttccataatcatattagttgaatatgaaataggtttgttaaatgaaattattcagagtgctaaaagtttatttccatatgagattattatagtaataaatgagaagcgaaacataaacaaaaaaactctaactgaatctggagttaaatgtattagaagtgattcagaaaatatgcgtgttataggggcaaaagaagcaaaaggagatatattgttatttttagatgatagtaatagtatttctgcatgtgaacttaaacaatttatgcaacctgctattaaagataatgcagatgtggttttaaataacttgcactctttctttattgaaagacagaaaaaagaatttccaggtgctaatattatttggagacaaattataaatgaagtgttaggagcgaatgaattaaaaataaattctttgctctctttaccaaatataattacaaaaaaagctttacaagaaattaaatatgaaactcttaaaaaccctgttttggcgcaaataagacttattgaagaagaaaaaaagtttagttgccattactttatagaaacacaattggctaaagagttttgtttagaagaaagagcattaaatgaaagatcattagtagatatagaaaagaaaaatatgaacaaacacttagttgctatggcagaatggttaatgaaaactggaattaggggaatgtatcatgatgttacaagaaatcgaaaacttgtaaatattcttaaaaaacataataccatccctttttcacaaaaaggatggggaattcaatcacaaaaatataacggaaaacaattgtctgtaattatacccgctcagaatgaggaagcaacaattggacaagtaatttgtgaagtgagaaaaattgagcccctagaaattattgtcgttgtaaatggttccacagataatacagcaaatgttgctacgcaacttggtgctactgttattacgtataaaaatccgttagggcatgatgtgggaagagcaattggcactgtagcagcaaagggagatattcttttatttttagatggtgatcttgttgtttctgcaaaagatctatatccatttccacaagctattgcagatggatgtgatgttgccttaaatgatttaaatccctttttatgtaaacattttccccttcatattgtcaccttatttaaatacgcgttgaacttagcatgtgatagaaaagatttaggtgtaggttcacttacagcaattccacatgcaattagtaaacaatttataaatgatatcggatgggatatattactctgtccaagcgttgcgcaggtaaacgctattttaaatgattacaagatagaatgtgtacattatgtagacgtaattaaaaataatcggctccgcccgaatgaaaatgttgtagcgaaaggaatttctccaactatatcactcattctgggagatcatttggagggtttctcttatttgttgaatcatagcaaaatgtaagtatattttagatagatgggaagggtgattaaactgttagatcagtataaaaaaatcaatatttcatatgaacaattacagcaaatgaattttcaaactacggaaccttttatactcaaaattgattgggataaagtagcttatgaatttttaattcgtattaagcataatgcttccaatgttattgtttttggctctggagcaggtggttttcaagaacaaccaattggtccacctatttttcatagacattcttggatggaagaatttgaagatactgttatatattataatgatcctactttatatcatggagaaatatctttaggttggggacagggggagttagatagattttatttacaagatatcgcaaatattttaaaactattattgataaagttgcaagttgattcgaaaaatgtgttgttttatggaagttccgggggaggatttatgtctttaatattagctggtttcgtaaagggttccacagctttagttaataatcctcaaacaaatttaatgaaatggatacctgtaccggtaaatcaagttttcaatttatcttatccaggcttatcaagagaagaaattgaagagaaatttggcgaaagaattaacatcacggatttttttaagagtattgaatacgttccaaatatttattttttacaaaatgtcgcatgtgaatttgatgtgcaaaatcacttactaccatttatttctgggttagagcaaatggatgaaaatacggaagtgaatcaaattttagtagacttatatttcgacaagaaagcagggcatgcagctttagagaagaatgaaacgattgaatatataaaaaaggtaaaacctaatcagactgtaagagaggtgaaagaaggagtggaattgtcagtcgttattgtcgtgggagagcaaaagtcgaaattaaatcgaattttagagaaattaaattatttaaaaccactagaaattatcattgtagctgataatagaatgaatactatacaatcaataacgacaattgttgaaagtaatgttgttgttattgaagagaaaaacaaatgtaaagcaccagttaatggggcaagaatagccaatggagatgctgtcttatttttagacggagaagatgttgttttttcagtggagttagcacaatttttaaagccgctattaaaaaaagaaacagatgtaatattgaataacgcagactccgtatattttgaaaaaatgaaaatagagtggccgagtattgctatggtgtatagaaaagtattaaatgacgtattaggacatatggatttaaagtatgattcgatgttatctatgtcatatgccatttcaaaaaaagtaattgaagacattggatatgacatcttacagaatcctatacttgctcaagcaacacttattgagaaagggtggcgagtacacacctcatcagcaattactaaaacctctttgaataatatatctacaaataaaaactctttctctggaaatgaattaactaaattagaagtgcgtgagattaaaaaaaatgtaaaagtattagaaaactggttacaacgaaaaggtgatagaggtaactatacggatggaggaaggaaaagagaaattatagagcaactaaaaatacaaaaaaattatttgcgtttccataaaggatggggaatgaagtcttctatttataatggaaaacagctatcaattattataccagcacaaaatgaagaagcgacgattaaacaagttattcttgaggcaagaaaaattgaaccgaaagaaataattgttgttataaatggatcgacagatcggacagaggaaatttcaaagcaattaggagcaacagtgattgtctatcaagaagcgttaggacatgatgtcgggcgtgcaattggtgcgcaggaggccataggagatatacttctctttatagatgccgattttgctattccagcaaaagatttacatccattaacgcaagctgttactgacggtgttgatattgctttaaacgatttaaatttaaatcttagattccctctatatattgtaaatatatataaatatatgttgaatattgcttgtaaccgtaaagatttaggagtgggatctcttgtagcggttcctcatgctattagtagaaaatgtttagagggaattggctgggatactcttcacacatcatgtattgcacaagtaaaagcaatattagaaggatataaagtagaatgtgttcattatgtagatgtaatgaaaccaaatcgtattcgaccacatgagcacttcgcgacaatagggcatccgccagctgtattaagaattactggtgatcatttagaaggcctttcgtatttattgaagcataggaattttaaagatttatttctattttaagaggtgattcagtcgattaatcaattgagaaatataaatatttcatatgagcaacttgaaggcatttattttaatatggaagaaccgtttttactaagtgtagaatggcaaggaataaattatgagtttattattagaatgaaattacaatcaaaaaaacttattattttgggttcgggggcaagtgaaaagcagtcgccacctatttttcaaagatacacttggattaaggatttcgaagaatctgtaattttttataatgatccaaccctttatttaggtgaaatttctttaggttgggggcaaggaacgatagataggtattacttgaaagatatagcgataattttagaaaaaataataagaaagataaatattttaaaagaaaatgtgttactttatggaagttcaggtggaggatttatgtcccttatattagcaggttatttaagagggactttcgcattggtcaacaatcctcaaaccatattaacaaattggtatactactcctattacacaagtttttcagctatcatatcctaacttatcaatacaagaaattaaagatacgtttgcagagagaataaatgttattgcattttataataagataggctatgtaccgccaatttattacttgcaaaatatagcagctgattttgatatgaaaaatcatttggagccttttataactggattacaagaattagaaaggatagatgctgtaaataaagttaaattagatttatattttgataaacaattagggcacatccctttagagaagaataaaattatgccatatatgaaacaaacgctctatgaagatagaatattgtaattaaaagttgagaatctcttcatgtatttgaagaagtttttacctctttagtttattttatctcactatttgcgggcagtaaaactcccacctcaaaattcggctgtagcaaagaagttaggtgggagttttactgcccataatagcacgattggtgagggttgaataaagttgtaacgatattattattttctcataaattgatattatgtgtaagaaaggagggaatatcttgtcttgcatcaacaagagttgttttaacatttgcttagaatctatagttaatccaaatggtggggcagaaatatttgtaaggtgcaatgatgaatgtccatctaatttcaatgtaataccattcattgcatgtatagctatttcagtaaaggatgattttagtttcttatcttatttagatagtttaataaaacgttaattaactatccaattaatattaaagaagcacctaatttattaaatttagtaagagagttgtatccgaatttaagtaactgcatatattgttaagagaaaggagggagagttatggcatgtactacgaataatgtttgttttgatgtgtgccttaagattacaattacccctggaagtggaattgatgcagtagtggattgtgggggtacatgtgggacaagtcctacaattgtaattagttctagtggatcaattgttattactttaccattaattgcatgtttctcaatctcgctaaacgatgatttaagtgttgcatcttcattaacaagcctctattttcaaacttcttaagaaagatacagaaatgaaaagcctgcctgctacttttcttttgatctaatgtaaaaataaaaaagatggttacaaccatcttttttattttgctatatatttaaaataaattcatatattatttggtggtaagaatatacaattaaaagcattcagtgtttcttttttgttcgatgaggtaagaaattgcttctatatgatcaccaatgatttgttgcgttgctaatgaaagaaaaccttcttgagagaagtgtttttctggtcgaacacgattcatcttatcaacatcgacagaatgggcatttttcacatgaaggcctgctaaaattgttttaacttgacttgaggtaggtgaaagaagtgaatcaaaaccaattgtatcaatacatttgcgactaaaagcatgaggcacagcaattgtggatcccatccctaaatcctttcgattacatgctaaattcacaacatatttacatgcggtcacgatagaataaggaaatcgatacatatagtaatactctaacttatttaaagctaaatctgtaccattttgaacagattgtacaaatggtaatagatcagaactaggaattaagaaatcaccatctataaataataatatatcaccttttgcaaaacgtgcgccaacagcacgtccagtatcattaccaagtggctctttgtagctaataactgttgcaccacaattctttgccaatgcctctgttttatctgttgctccattaacaataatgataatctctaaaggttttaatttttgtacctcataaattacagattctatcgttttttcttcattttgaacagggatgataaccgataattgtttatccccataagtattcgaataaaattctttacctgtacttatttttggcatatatttttgttcgccgttttgaagccctaaaataatatcccgccttcggctactatcagtgtagtttcctcttgaatcttgcgctatatttatccaatgttcaatagcttcaagatgataacaagtgagttgttttgaagggaaggaggggatttgaggtatataaatttttagatgattgcaaatctgaaatttatatttaataattttcatttgtgccaatatcggatttgataaactttctggagtaattgcctctagaactttttttgttattgcatagggaggaaataataatgagttaacatttaaatctgaacgatgaaaaaaatgattcgtaacttgctgccacatcattgctatattaggccgttgcttcttataaaaaaaataatccaaattatttaatactacatcagcggatccgtctagtaatggttgaagaaattgtataagtgtggaagattgaataatgtaattttcatctaaaaataataggcaattacctcttgccttttttgctccaattgtataacaaatattatattctgttgattcttctagtgtaataactttacaactgtaagatcgtgtaatatcaatacaatcatcaatacatccgttaataataagaataacttctaaaggtttcagttgttgacatgcttttagaatttcgggtaaaacgcttgtttgatgctgtatggggataataatagagattggatttttacacataagtagtctcctttttaatcagaggtagttattaataagaatagataaaataggagataaatattttcttgttacaaacatagcaattatttagttttatctgcctccgaattttcattaactgaattagaacctttgtttataccagaagctattaaattattgagaacactaagatctaattgcatagggattgagttttcggatgtagttttctcattttctttttttgtagttaatattgttcttatggtttttatttctttatattgttttaagatgatgaaaaaaccagaaatgattaagagaaaagacaaagaagtaagcaaaaatattatctccaacataaaatatcctccttcaaaaagaaaattataataatattatctaattaggtatttaatgatactccatatttttatggttgaatgcaataagaagaaattcgtattaatgagttcgcttttctaaatatatgcaaaatttcagtaaaagttactggtttttaagttagaggaaataattataggtacgttgtacaatctaatgaattaaagatttatttgtagtgtaaaggtatatattatataagctacacgtcattatataaaagttaaacagggtgtaactttatagaaaaagagcatttaattggacaaataattaattatgtgaaataataataacagataaggagacgttgtttttccttaagtgcttcgaattaattttattcaataagagaaggtgtgcttaaagaagttaaattaaataaggagctgttttattatatgcaacaaaataatgatttaaattttgaacctcaagacgttaatattgtcaatcctaaacaagccaggaaagcagtaattgctactggtatagggaacgcaatggagtggtttgacttcggattatacgcgtatttagcggtaattttaagtcaattattcttctcaggtgttgataatagtggattgcaacttgtacttacattcggtacatttgcagcagcctttctcgttcgaccaatcggaggtgtattctttggtagaataggagataagtacggccgaaaaatcgtgttaagtactactattattttaatggcactttctacattattcatcgcattactaccaacctatgaacaaattggtgtatgggcaccaatactacttttagttgcccgaatgattcaaggcttctctacaggcggcgaatattcaggagcaatggtttatatcgcagaatcttctccagataaaaagcgtggtatactcggtagtggtcttgaaattggaacactctcaggttacattgctgcatcggtaattgttaccattttgacgttattgttaacagatgagcaaatgctcagctggggatggcgtattccattcttaatagctgcaccaattggtttggtcggtttatacttacgccgtcatctagatgaatctccaatctttgaagagatggaaaaagcacaagaggaatctgaagacaatgaacaattttcatttatggatattattaaatatcacaaaaaagacttcttattaagcacagtaattgtcgccttctttaatattacaaattatatgattctttcgtatattccttcttatctaactcaagtacttaaagtcgaagaaacaacaggcttattaattatttctattacgatggcacttatgattccactagcactatatttcggtaaattaagtgataaaattggtaataaacgtgttgtgcaaattggtttacttggtttaactgtatttgcaattccagcatttttactaataggtaacggacatattgcagctatatttgcaggtattttcgtactaggtttcttcttaagtgtatatgaaggaacattaccttcattattaccatcactctttttcactgatgtacgttatcgagcactttcgatctcatttaatatttctgtatcgatattcggtggaacaacaccgcttgtatgttcatacttagttcatgcaactggtaacccgctcgcaccggcattttatttagcaggtgtaagtattattggattagttgtatttagtgtactattcgttacgacttcagggcgtgcgctaaaaggttcatatcctacagtagaaacgaaaaaagaagcacaccaaatcgctaaagaagatcctgaagaaacactttggtggcatgaagagtcattagaaattgaagcagggaagaatgcttccatttaaaaagcaacgtagaagtataaaaagactcctatgaatataggagtctttttgttacgttatttctttcgtttcttcaaacttttttgatatgcataaagcttatgaatctcttccataaattcatgtagaagtacagtgtttgcaccatttgaataccgcaccgtattataagcatctataataatatcactttgaatatttacatcttcttcatcgtttattctttctagccaagcctcaacagtttctccccgttttctatttaaaggagaggttaacttactctctagcttgaaaatttccttccgaatttcgttatgtggcggtttatttcgtttaaaacgattttggcttattccttctttatcagtaatgatagtagattcgaaggcgggcatatttggtaaacttaaatgttttcgtttttttactattttccaaacgacgtaaatagcgatagctgtacagactattattgtagcgctatttatgagtattggatcaaaatcaggaattttttttccgtcttcaattttgggttttaagagatgtcctttatttgcccaaacatcttcagtatcttttaattccgctgctttaattaatggcattaaagcatagccgacgcctaatgcgactacttccgttataaaaccaaaaataagtcgaatgaaaggaaatacttgaacaattaatatactcattaagccaatcgtaatgatagaagcaaaacgtaatagttgttgtttgcgatttgccccggttaaccaaaatgtaatcataagatgcaaggctaacattaatagtttccacaacggtggaaagggtgcataaaatatagctgaaacgacaaaccatacaataccacctaaagatttttgaactggatatccaggtccgaccacatgtacgataaagaaaaatagtggtaatatgattgtgccaaaaagagaaaaaggtaaaaataaagagaaaagaacgatttgaagaactaaaagtattacaaatcctgttgtttttttctgcataaatttatgaataagaaatactccaatatagcctgttgttaaaaatattgcaatactaattagttcatctctttctgttaataatgaaagcaggaggagcagaatgaaatcatgaatgtgatatagccaagttttcaactggttccaccatcccttcactagtaatgagaaacgttggctgcgagagaagagggagttcatttttttgtaaaccaatgtatatcattgtagacgatcgttctctctttctctttacataatgaaggaatccttgtttcggaagtaacgtactatcatctgaaatacgggctaattcttctaaagcttttgcatattgtgtttgtccttcatttaacggtacatgtaatgcaccgccttctgctaatacactaataaacaattcaaacggaatgtggtgcttcgttgtgtactggaaaatgtatgttgcatatgaaataagttcttctacattatctttccaaccaaatccacgatcggcagctaaagaaagacaaatcgtccaactataattttttacaggttcatattgcttcgcttgtaattgttgcattttagcagatgccttccaatgaatagagcggaaagactcacgctcatatcgctttacaccgataatagatgtttcatcattgtaaaaagaaaaattcgttcgataaaatccattcaaaagttgctgaagttcttgcaaacctgctacttctttaggagaaggatacacaataatttcagtccttaatttatcaaaaacaggtaaatgtacagttaatagatgaaatggatcttttaatacacattcaaactgttcaatttgaaacacaccacgcttcgttgcggttaatgttaaaccccatttttgtgccgaatgtgcgggttgtgaaaatgggaaagagaataatgtttttgatatttgttcaatgccttgctctttatgcggtataagggacgaatttaaatgaaagtaacaaacaccattaacgagcggtatgctggctccattttttaaatgaataaaaaactgtccagattcctcaggaaaaagccgtgtagtttgtttctcatttatgatttgaaacttcttctctatgaaagcgacatatttataaataaaaatcgcaaatatataatagaagaaaaagagaaacataagcattcgttgcgggaaaaagaatgtgaaaagtaacgcgattggaacggttagttgaataatatggagttgaaaaaataaaggcacagttacaacacgctgtccattcatgcttgctcaatctccacaggtacgtcaacttcttttaaaatactttgcattatatcatttttagtcgtgcgcagggcaccttccattgataagacgatacggtgattccaaacagaaggaactaacaattgtatatcttctggtgtgcaatattctctcccgcgtaaaaaggctaaagcttgaacagcacgtactaaagctaatgtggcacgtgggcttacaccgttagcgatataatcatgatttcttgtagcatgagcaagtttaataatgtaatgttctaacggttccgaaacaaatatttcttttactcgtttttgagattctaaaatatcttctaatgagatgacagatgtgacactttctaatggtaaatcgttccgaaaacgtcgcatcatttgtagctcatcttcaggagtaggataaccgattgaaatcgtcattaaaaagcgatcaagctgtgcatctggaagagggaaagtcccttgtgattcaattgggttttgcgtcgcaataacaaagaacggtttcggcagaggcgtagattgtttttcgagcgtcacttgtcgttcttccatcgcttctaacaaactcgactgcgttctcggcattgcacggttaatttcatctgctagcaaaatgtttgtcataactggtccaattcttaattcgaattcgcttgtttttgggttgaagtattcaatacctgttacatcacttggaagtacatcaggggtgaattgaacgcgagaaaaactaccaccaatacttttggaaatggttttcgccagtaacgttttcccagtaccaggcacgtcttcgagcaatacatgcccaccagcaagaagtgaaacgagcagtagatcaataacattttctttcccaacaaacacagatccgatgttttctttcaatttatttatcatatgtaccattcctttcattataaaagagctaatatttctatattttaacaaattattcagaaaatttgtatggttttttaattcaaagaaatggatatttaattattaaattactcttgcatattttggaatatgattatacaatatcgatatgcgatgtatcgtaagtcgatatatcataaggcgatgtatcggaggtagttataatgaatgggaaggcgcaaaaatatattccgttaactgaggcgacatattacatattattgtcactcgtgaagccgttgcatggctacggaattatgcaaatggtagaagagatgacaaatggggaagtaaagctcggccctggtactttatatggaaatacgacgaaattactaaaagagaagttaattgttgaagttgcctctacagacagaaagaagtgctatgagttaacgccgtttgggagagaagtgctggaactggagtacaatagattgcagagatctgtaaggaatggaaatagtatattaggggagtgaatgggaaatggagacaaagaaggtattcaaaccttttgcgatgtaaatgtcaagataaacatgtacattttcgcttgtttaagcatgtacaaaatcaataaagtattgttgtccttattcccccttttcggggggatgggcaaaaacacccttgtttaagataagaagaaaactgttttgcaacatccatgtgatttcctccgcgtctataaattgtgttgcgtctaaaagtatttatttatcgataaattgtgttgcgttaaacccctagatttatatttattataacacctaatacaacacaattaatattgtgttgtattattttttgtataaaaaaagacactgtatgtgtcttggaataatgatatattttctgattttttaactctgattttcttagcgtggtttttttccgaaatgctggcggtaccccagaaaacagttaagaagcgaagggtagctaaaataatagtgcaaaagagaactttggtttcattactgaagttctcttttttgaaaatatgcattatttcatatttgacaagtacggtttatcgacaatttacgacaaaatctctagtgttattatgctaagatacgacatgctaacattacgttaaaagaatattaaatggatcgagattattttttagttttgtttactttgatacttccagactgaaaggttcgattttaaaataataaattaaaaattagaaattacatagttctattcaaggagaaatgtttatgcatgataaaataaataaacaagaagaaactaaaaaagcgttaatagaatttctaagaatacttattgatgaaattgattttcaaagaagaactcatggtaagttagcggaacaaattgggattagtagtggcttgttatcaaggcgtttatcggggaaaaatcaattcaattttttgagtttaattaagttgttaaatattttatatgaaaatgatgcacttcaaaaacagaaattaatacacaagttttgtttacttaccacaagtaaacaaaacttacgtattgcgatggagtatgcgcatgctaaaggagatttgaatctgttaaaactactcgttgatcaggaaaaaacatcatcccttgcaacaaatagagaatgggcctatgtatatgatttggtatggacaaggggtcaagggactcttctaggtaaagagttacttgaaaagttagagagtagtaaaaagggtagagtaataaagacaactgaaatgaatgctttatatgatgttttgacatgttatattatgtatgatatagaaaaagtaacctcttttttcgaatatattgagatatcgaagccgaaattcactgaaataaaagatgaatttactagaaatatgtataaaattaggatgaaggaggttcatgctgctgcacatttgttggggggagatataaaaacttgtcgcaaattatgtaatgagattatagatacggaagatttgtatgatgttttttcgatacaaaaagcttcagcatattcgtatttagctgagtcatatacctttgattgctttgaaactgcatcaagttatgtgaaaatggctttgcaatatttagatacattgtattttaaaagagcggaagtaagaaaaaaacaaatattaaatacatatgggtttatgcagatggtacagtatttaactagtgagaaaccacttttcaacctaaatgatattaaggtgtttcatcctgctgaacaagctttattagaaacgctaaaaggaaatagagatacggcgataaagattataaaaaatatgaaaaaagagaatggatatctattaccaatagagtattgctatttaggattggcgatgaatgatatagaatacattcataaatctattgagttatttaggtataaaggaggagggttttatagtgaattaccgatttttatattgaaatatttttcggaaaatggtatcatgtataggagtgtagaaaatgaaaaaagtattatgtgtagttaaagttttagttatagttgctgttgtattatgtacagcttacgaaaaaaaagaatcatatcagatttcccaaaaacatgaaaagcctttacttgctaaaatggttaacccaggtggcggagttgggtaattaattatatttatgaatgcgattgtctcaaatgaggcaatcgcattcgctgtttttagggatgtttactaaatttcaaattcgtaatttagtaaaggattgtgatttgattcacaaactatgaaacgataactatattttaattactaattatcaagattttatattaacaaagctaaaaagaagtgttaaaatcagaacaaacgttctacgcatttccacaatttgtaatttagaaaagtcaaaaaaaatcccagttatctaatccgttgataacactgggttttccgaagacttttgatatgtagtttggttagatgtagcagtttttgagaaattatggattgacgataaaacacaatcgttgtaatcttaattttgaaagatgtttattagcatctaaattgtgaactactaacaattacatagttacatgggctgaaaataaaaagagctaccaactcttgatattttcgaccttttaaaacaacgacctgttttagaaaggctgcccacttaatgaagcataacgagatgcaacatcaataatattatactgtttcgtgtatttatacaagatatgtaaatgtatacgtacacgtgagtttaagcaatattattgatgttgtgcggttatccttcttaaaagtggttcttcggattgaagaaaaaggcgtagactaaaacattagtttacgccttttttgtattctgtaagaaacccattggctatatgaaaattttataatgctcacctttatatttgtaattgtttatgtggatagggttgagttaagaaacttgttaagtatgatgaatctagaccctgagaaagtctagatacaaactgaaattttaaagattggagagaagaaccatgagagaaaaagagtttagcaaaggtacacacaggcttaaagtaacaaaagagatggatgttggcactctattaaacagagcgcacaaagttagtacatttgatggcaagaatttagtcgttctcgacaatggcaatctgtacgatcaaacagttagaagagaagttccagtaacaaatatgtttaggtatatcaaatgcgtaagaaatagcgatggtatcatcattgccaagaagaataaaccatgtgctacattgatgcaggttatttttgagagaaaaacaaagaaaaaagtgaagtagtaatacatttgatcgatttaattgtgcaagaaatacagcacacttggggttcatagcttaaggacataattcttgtgtatgttccccatacgttctttgaaaacttgatatagttgctgggggaagggcaaatcatcgcatgccaatctatttcgtgaatctaggagatgcaagacacgaataaacccttagggacaatagtccgcttgaaaatagcaatcgatgttggtctatctgtagcaagcctacagactacttaaagggctgtacacatgacgccatgacggagaaattccaaagcgatatatttgtacaagcattcctttaacgagagggcgtaacgagactaaacgcccctgttacaaatggagatactcctttttcgcatttgtatccgaccgaatatagaccgtttattttttaaaaatcaagaatacaaaatattttttgtagaattaaacagatcaaataggagtaaaaaattatgagtatggaatgccgagaaaggtatattaggcaaatagcaaatattcttacaagcaaaacaaagcatgcaacaggctgcctaattgaaggcaaagatgatgtgtgtttagagtttcaaatagagctaataaacgcattacaagataatgatacacttgcttatcatgtagatttcaccgattatacaagcgaaactgaatgtcttgcagcgttgaaaaaggcacgtaaacaacttagttcaaataagcaagatggaaagacattatttctttctctagcttcctttgaacgtgtagagaagaaaacaatggatgcagtaaaaatattaattggtagccgatcactaggcatacatttactagttagtgcaaataagagattcgtccacttagtaggattaacagaatacttggttacaatgaacaaatcagatgtagtgttttctcagctgtaccgctatagcacacaaaaggtactggcttccctaaaaaatgattcatggggggaagctgatgaatcataaaatcgagaaaatattgagaacaaagagcattcatgtagatttgtttagattggatgaaagatatgatctcggacaaagtatagatgtttgctgtaataaaatgaatgtaattcatacctttaaagtgtttaacatcactttgctaagaggtaatcattggctcgttcatttgcagtaaggttgtagtatagcgctataaaagtagtggggtctcaaatgttcatatgttaatatattaatgtaatgaatataaatggaatggagtgtagagaccatgtttaaaaggtttaagtttttatcagctgtatcggctttatttatatctataacagtactgcttgcagggtgtggaggttcttcagtcccctataaaaagggtgatacttataaaaatagtaaagacaatttcgttactattacagctgacaacgaatggagagttaaagggtatcaaaatcgtgaagcaatttataaggtggagccaacggaatataaagttgattcgtattcagttgtatcaatttctgtaaaagaaaaaataaatggtagagatcctttgcaggttgtaaatgattatgaatattacatacttgcaactacagaaaaaggctttaattctgtgtatattggttcttcgcatccaaatgataccaaatggaaagaaatcaagaaagaattagaaagctctagtgataaagaggatcttttgaaaaaagagtatgagaataataagaagactctaaagaaattcgaaaagacaaattaggacatacaaataactgtaagagcagaatcatattaatggttctgctcttttttattgtcaaaattaagtagggcaatgggaggtaaggggatatgatcagccgagatcaactgttatttccagctatgataacttttatggttttaatgattttgttatttgatgcatcgctatcattcataatgattcttacagaaaagacaatgtagtaatggaaaacgtcaaatcagctgtaaaagatgcttgtttgtggttgttagttttggttttaacaactttaacctggctgggaattgaaaaaatggttattaccatgcttttagactaaatatattttttgtgtgcaaactctttttgcacattttaaatgggggaaagtcatgaatattgttgcaacatttcattttgtaagtggtttaagaagatcgactattatcaaatcggagaatatagagaaagcgagtatatttattaataataagttttttcagggtgttggacatgcaatatttgaagtagagatgcaagaaagtagagatggatttgaaggtattgatggtaaagtagaaaagtttgaagtgtttcgtgatcaagtaatgtttattgattatcaagtgaaataattttatgtaaagagagcagatccctgggggctgctctttttatgttttgagattagcaataaacaaagcatattgagtatcttcaatatgttttgtttgtaattaatcgataaattacaagttgattagaaagtggaggtgttagcatggtaaggcttggtcaagtcgaaaaagctgttgaaatcgtgaaggaagaagtacaggagcaagagaatgtaaacacagctgttgtaggtggaataggaacaggaaaagatttttctgttataatacctaacattctgctagaggaagaaaagaatttagtagtaatagatccaatagatcaaatatcaaatgtgtatacatttaaagaaaaacaaggatatcatattttaacgtataatttagaaaaagaagatattttgcggcagttaaataatgatttaatggcaaaaaaagaagaaaaacttttaattcatgtaatcttccctaatgaattttttggaaatcaagaaatgaatagtcaacgtgttatggaattcttaatggaaataaaagaaatgcaagatataaagtggggacaagaaaaatcattacatcttttccttatggaatatgaagaatatgcatctcctaagtttcatgctatttttcaaacatggtgtggatacagaattagcaccacgttgagcgttcagcatgtactaagattggatgatgttattctagataattgtcattatgtactttataaaagaatacttgatccacaaacagctgaatggattgcagagaagctgaaatatcatcatgtagaatttcactcgaaatttttagtaacaaacttattgtttttaccattgacagcgggtatgttaatggatttacctcttaatttaggaatcttacagaaaaactatagagataatccttatggaaatgattcatggacaaaacttgtagaaacttacaatgctgaggatattttgggcagagcgttatatcctaaagtgtaaaaaaatctaaagataaagatgataaaagagcagctccttaaaggtctgctctttttttatagtcagttgtgtataagagtggaggtaacagatatatttcttcctcctttccccaggtgatatagcgttgttacctctactcttatgtacatctaaaatattttaaacaagattggtactgaaaaagggtagatcctaaagggactgctctttttgttaaacagttgtatataaaagtagagggaggtgtttgtattggtaaaaaaacccctaataacggaatacgagttagctaatttgaagcataattcagagaaagaaaaacaagtggtgttagaaatttatagaatagcttttgaaaattttttagaaaaagagtttactagtaaatttcttactaaaaaaattagagagcaaatgaataaaggatttgatcatttaggaataagcctaatgaattgtaacattatggagaaccgtactagtttcaattttaaggatatgattagaaaaacattttcgaatttcttttgtaggtttttctataatagtgtcgttattaaatggaagtattggaaatatcgcaaagacgtaaaaagaattgtaggtatttgttgggaagatgaaataattgaacttagcatggaagaaattgcagaagaagtaatttataagagtaatgtttacttgaaaataattgatgatctagagaaatcaggattaagagtaagtgtgaaagttgatggtgaaatctttattttacttttaacctgggggaaatggatggagacggacaatgaagaaggttagaaaatgtaaaaagtgccagggcaaaggtttcatgttcggtaaaaattacataataaaagagaattcatttggttatgaaacgcaggagtttggtattaaagtaacctgtactaattgttatgggaaaggtattaaataattgtatgattctaaaaaaatataattggtattcagaaaatagatcctatactaaccgtagcaaacgaggggggaaatcatgaacaaggaagtcacaataaaaattaatgaaaaaggttgggaaatgttcgttcaagttggagagaacttatatgaagagaaaggtatcatgcagaagtttaatgatgctttaaacgtaaaaggcgtgttagacgaagatgctgcatggatgtcagatcctttgtttcaagtacttagtgaaaacttcttttgctatcaggtagcaaatgccttaataaaaagctagtaagagggtgaatgttttgaatgcagcagaaaaagaacgtaggataggtcaactggaagatgaaattggtggtatatggatatctttatttataggatgtattatgtttttggcgttacagtggggaatagaaccaatgatgaaaaatgtactagatagagagggttttccaactactcttgttgatattatttttaattatattattggtgctgctttctggatagggtatatcattggaattataactattttgaagaaaaagaaagaaattaggagatataaaaaagaaaaaaattctccttcaaaaattaatatacaaaaagatgatataaatcagaatcctgtttatgtaattgatcatagcaaggataaaaaaaatcgatatgaaaaaggggatagagatatgatgaagcgagtatttaaccaaaataacaatgtttctactaatttgggtaaacagaacactaataaaacgagaggtaaaggaagtccaatacgttcatacaatgggtctactcattcttctaatagtacggaaagtaatgacattaataatattgttttaggtgttgcattaggaagttcaatttattcttcaggggatgataataattgttcccaatcggattcttcatcgattggtgatagcggcccaagttgtgattaatggtttctgttgaggattaataaaataagagaatgtaaaagaaagagcagatcttaattggctgctcttttttattggtaaagattagctataaacaaagcatattaggtagtaatcagtatgttttgtttgtaattaatctcaaaaggaaaggcaatttaagaaattagggaagtggggatggagatatgaataagaaaaaagcattaattagtttagcgtacgctatggcgctatatagcttagtaggttgttcgaattctactaatacaggtactatggcagcggagaatgaaaaggctgctacaagtgtaaataaagaagttacaaataccgaagaaaattatgaattaggagaaattaagattacaaataaagaacgaaataaggaatcaagaattgaaattctagaagctcatattgttgatgatggtgtaaggggaactgatcctcgaaatacagccttacaagaagtaatcattttacatgataaggtacaagattgtaattatctttatacatatagctccagtagtacgggatcaggttcagcgacaatgaaaaagctagagtgtggtaagaaagagtaaggtgattctatgaagaagctaataaaaatgatatttagtatagagtgtctcatatttgcactgatgatatggtttttcttatggtcttatacatggatgactaatgaagcaaaagaggataaggtaaaatccctacaaacttatgaaaatattaaaatagcagaagagttaattgcaaaggaactaaataaggatattaaaaacattaagttatttgataatagacatggcaaagaactaaataatcaaaaatgggtagaagaggacatgaattgtaatgtcaaaacggatgatggaaagtataaagtgtattttaatgtcaaaaaaataattgataaaaaaacgaatactgaaatgtatgcccctaaaaatattgaaaagttagtaagggagtaacttaaaatggtcaatattattatcatttcaggaattgtttttctaatattagtattgctagttctttatatccattggctaataaattaaagggagagaagaagtatgaaaataaaagaaacagattgtaaatatacgtattgggaagaatcaataaaaatgttttataaaaagcaagaatgggaacgaaaaagacagcaagaaaatcaaggaaaacgagaaggtaagtagcatggattcgcaaacaaagaagaataccagatctaaaatagggttaattaaagtaataagcataattatctttattgttggagggctagtttatataggaattagttgggaggagtatcttgataagagcaataaggcgcatgctataaagatagaacaaacccatgaaaatataaaaatagcagaagggatgattgaaaaagaattaaatattagtagcaaatatttcaaaatgctcggtacacgcactcttttatttttatcagaagatgcagaactaaacaccaatacggatgcatattgggtaagtaaagatataacatgtaaagtacaagttaatggtgagaattatagcgttacttttgaaactcaaaaagtagatagtgaaaatgaagaattagaaatgtatgaaccagtaaaaattaacaagatcataaaggagcagaaatagtatgaaaaaattcttactaggatttgttcttatagggcttgttggttgtgtagatgttgataagccggtaacaggggattctgaagctgtacaagagatttcaagtgagaaagaaggtattaaggtttttgtagataaagagacagggtgtgagtatttatatagaaataaatttgttggaaatgttacatatggtggaatgacaattagactagatgaacagggtaaaccgaaagggtgtaaaaaaatctctgagcaaaattacaactaaatatggagggttacaatgtcagtttatattgaaggaattcatgaggattatacttatggattccttttttactctaaaaataaaagaattgttttggatgatggagttcaagagtacccaatagatgaagcagaagtactcctggaaaaagaattcgtgtttatagatgagttaaggaagcttgatccattaaaagtaccaggattaagagcaaggattaaattacaagtgaattaaatagaaatcaaaagtctatcaaagcctattggtagactttttagttttatttaaacagtaatgaagttggaagggaggagagaatataatgccagtctttcatgtttggtataaaaaaggaataacagatgaagataaattacatcaaattgtcaggtcgaaaaatgaaaataaggcaatattaaaaagtgatgcttataaggagggaaggtgtatagatgatgtgggaatagaaaaatatgagtgccttaaagcggaattcggtatgtctttaagggaggagttattcgagcttggatgggcatttcgatgtgcgaaatgttatcaggtagtaggtgatggcataatattaaccaaagtattccgtggaatattttgtgaatgttgcaaggaacagaatgccaaagaaattgatgagtattcacattttagaaaagttattgatgcaaggctaacttatatatttcgtattagttgtttgctcatcataattgggacgtgcatggctggatatatttatgatgggatttcattaccaggatttgttatgagttatcttttatggtgtacaaactggctgttttattatatttctgttaatcaatcaacgtttgagcctgagagtgacctgaaaaaagattcgattgcaataggcggttttacgtttatccctattgtgataaatttgcttgttactggtgaaattcctaattggttataccttgattggtttaatagccagtggttaaatttaagttcgtttttaatattagctgtaattttaatgataatagcgtatattatcatatttatattctgtgtattagtgcatgaagcgataccttctttaatacgatggttaaaacgacaaagaaagagctattggattgatttaaattatggtgattgggttatttataaaggatgtacttgtcaggtaataagttctaatactttatttcatagtaatagatattctgtaactcttgatgaatggagttaccttagtattgaaagtatcactcgcttagatggttattttatagttgaaaataaaaaaaacataactgtatttatggatgaggatgagattgaaagagtagcaacagaggaagaaattcaacaagaaataaatagaagaagtaaattcaagatatatgagtttaaggaaagatatgggttagaattcacatgtgagcaatatggacctgaactcatagacaatcgattttattcagagggtatcatgtttaataataccaaagttaagagcaaggattaaattacaagtgaattaaatggaaatcaaaagtctatcaaaaatatatggtaggctttttagttttatttaataaggagtggttaagagtgctgaacaaagtaactattgagtttggagaaggaacaaaagcctggaaggatatgcaggatgtaatgactattttaaaagaaaaaggatattctgttgaaccttatgaggaaattggcactgtaaaactaactaaggggattgttgatgagatgtctgaagaagatagaggagcagagtcattagcagcggtataccattctaagtaaattgtcatagcgctatgattcgactgaaaggaggtttatatggaagaaagagcaagaagtccaaccaatccccttctctcatgtgaggatagatcctcatggttgtaaagagaggaggaatacgattgtggtttagaaggtcatttagtttactatttgttgttatgcttctgtttggaagcttggccgactttgtatcaattggacatgcagaaagtacatcggaccagaaacaggctcaagagaaaaaaacggacgatgtgactgtgctgcaagaaaaatctgatctgaagagtacgggaactaatccaagcgaggtagttgtagcaaatggtaaaaaaggtagtgagttgtttgattttgaagcctttattaagccttcagacattgtagatggaacagcaccttttgattcgaatgatgaagcaggtaatgattctagccctaataatggcattgtaaggacgtttgatacagtaacgtacccattgaaagtgacgattaatcctaagaagaatgaaacgttaaaaaatattaagatgaaaatcactggtacattagaaaatggaattacaaacaagcgtgttaatgcaaaatttgctgttggtggtaaagaggatttggaaaagggtattgtttcttttgatatggaatacacgttaaaggaaacaggtaactccttaatgattcctgttacggtggaagtacaaggggcggagcatggattgaaattaaagcctaacattaaaatccaggttataagtgtagatgggaaagatattgcaaatgaaaatgtatcgcaatcatttgatggtattagtcccgttactacttcaggaaaggttaatgtaaaggctcgctttactgcttcttatggtggaatgcctagattggattataaggtttatgatcccaatgcaaaagaggatgatcgtacaatcatatatccagttgctttagatttatttgtaaataatttaccaaaccgaactgatttacgaggagctacattccctgctggaaagattaattatcactttaatttttcaggaaaagtcgattgggattataaatcgttaggtgcagaaacattgaattttgagggtcgggataaaccgataaagatctttaactatcaggctattgataaaatagtagataaagtgccacaagaaggtacggaaagttttgaaattggtatgaagggctataaagatcctcgtactgagacagcaaacagtcctaaatcatatattccaaaagatatatggaatgctagtgatattgataaatacacgattgacagtgtatgggatagtggaacagtacgtttgaataaaccagaaattacaaaggatcgtgtaggttatacgggtagtatagaagactatgtaattggttcaactttcccaacgatgatgtcaaggccaggttattcagtaattcctaccttcggaaagaatgaaaaagcattttcaagcacacgtttcttaatacattcaacaaatgaatattatcctgtactgggtaaaaataataaggataatctaccgaataatgttttttattatttagaatttgttattgattcttatgaggatggcaagggtaatacaattccttataacactgttggaagatacacgcttaccgaaaggaataaccctaaaggtgcatactccatacaaactacattccatacaacagatcataaggagttaggtacaccaaatgttggctatagcgctgtatctaaaggagatccaacagttatagtaggacaaaatgtaaaagtcgttagtcatttgaatgttcgtgctgttacagaaggtggtacaacgatgatttataagtggaatacagattcgttttatctatctaaaaatagtgcggaaacagctaggaagaacatgttaaacgaggggtatcccaacacttctgcgggaagggttacaaatagtgataaacaaaaaatctattttggaatatctaaaaaaggagataattcttttgaaacactaacccaaaacaaagatgaggattatgattggtatagcacatatgatgaagcaaagaaacaaggtgaagtagctgctatcaaaaatgatattaatgcatctatgggggatggtgaggttgtagcatggaatattccattagaggtaaaaacaaagaaaataggtagtgttaatgaaaaaggaacgccaaacataacggttacggattcaatagtgtatccttcagctgatagaaaagtgggttatcgagtacgtggtgaagggaaatataataactttactgagtatgatgaaaagggaaatataacaaaactgcaatctcctgtaggaagtactgtgaattttgaaacgctaggcattatgaatggtgagacgagtagtgatgtgaaaacaaataaaaatacttactacagttcagataatgttagtgtaaccgttgataatttagtaaagttacctgatgcaatggattataattcattagatgaaaaagtagaaatgagagtgaaaataccaaaaggtcttgattatgtggttggttctgctaaatatggtgatcagtatatcgaaccaaaaattgagcaacaaaatgatggaagtaatcatttgatttggcatgacacattgactcgtggtaataaaacgctcaaaaaaatcaactttgagacaagaattaatcctgtactacttccgcaaggaaatcaggtaggtttggaaattacgaatgttcttagtagtgcgatggacacaagggcagaaaaatttaggacaagttctaagaatatttcagttgtgaaaattggtatggttggtgttagtgaaacaattgagaaagtgacagggaaaaagaacagtgactatgtggtcggtgttcaaccgtatacgacaatcaaagatgagtcacatattaaggcacttacatatgttccaagaaataaggatcataatggatctgcttttaatggtgttactttcttgagacaaatagcactagaaaatgctaataataagaacgttgaaatatggcttaataacagctttgttgaatcaaataatccaaacaaaattgatttaaagtcaaatggttggtataggtatacaggagagcaggatctatcaaaagtggtctctattttgctgtatataaatgattcattaagtagcagcgatattgtaaaaatgaatcttgtttacggcacacataaaaatgaatttggagatttttacgtaagtaaaacagtggtaaatacctctgttgattacaaattatctcctgtttctaaccaggtgaaatatacaattgtagcagatgcaaatttaggtcttagaaaaataagaatcgatactgcacctgctgatattggtttgccagtaattgtacgtttagacaaggacatcatttatgaggactctaataagagtaatgttgctgttaacttatatgataagtctgataataagttggtagacagtaaagtatatacaattcaggaattaccggaggaaataaaattcaaggtagatcctaaatttttaaagaaaaataataagagaaactacgaggttagatttgaaaaagtcaataaagaatctatttttatcgtagatgggaaaggaaaagtagatacggatggttatacttcttctgaagaaactgtaaaggcaaatacaaaagcatctactgagttaaaatataaaggcgttataatgacggagcgtgaagtcggaaaagagatggaagtcttttatgaaacacttacaattccgttaaaacagctacctaaacaaaaaactggctatggttttgagttgaaaccattagttagttataacaatgaattagcggtttcttatgatgttaagacaaatgctttagtagataagagattaattgattctcatttgaattatgagaaaaaaggtgatcaatttgttgttcctttagaagaagctgagaaaacaggcagcacggacaaaaagaacactgattatctttttgaattgccacatattaatgtggaacaaaaaacgggtaatttatttacagaccaacaagtaaaagaccatgatccacgtattaagaatgcaataaaggatgggaagcgaaagttatatgttcctatttgggcagatctgggagaatacaacgttttaatagtatcgggaatccctataggcgctaataaagttaactttgaggtaacacaaccattaaatttatatgcatatatgtacgggacaattggctcgaaaaccctggaagatgatgaattactgttagagcctgttgatccaaaaaatcctttctcaaatggcaaaccgcctggttggtcagatgtagatgttgcttggttaaagcaataggaaaggagatgaaaaatgtgtgaatgtcctaacttatcattcggccaagaaacaaattatctttatggcgctatacttcgtaattacaggaatagtaattcgtttaattggatattcgttgcaaggcagcctttctgcttttacacaagctggcatcggaaatttactttcgggaaatttatcattaggtgatatgttccactttgactttagctttgatacgagtcaatttgatggatttagttttaatatgtggattgtttttataaaagacaagattcatagtattataaatgatttattgcctactacattaggagcaattaatatgcttatgatgggcaaatacttaacggtagagcgtgctattaaattaggcattaggttgtattaaaaaataaataattggtagaaaaagagacgtgattttttaattgcgtctcttttttatatacaaaaataaaaattgagaggatgtagtaaatatgttagatcaaaatacggatcgtagttggtggatgattggtgcagtttctgttggtggtgttttgttaggagcaatcctaatcgcttatcctgaaattttacaatcagtaattgatttgtttaagcaaaaactggctgctgcatcaaaataactcttttaaatgtggatgtttaaccattatccaacaaattagggggagtaagctctccctttatttgcttggaaaggagtgaaagaagtgaaagaacatcctttcatcctagtgataatcgttttagggattttcttagtttccataggtggttattactatagagagaattttgctactgattcagtcacacaaggagttacagagacagttcgagcgagtgtaatttcgaatgtagataatagctctcgtgtgcaaagtggagagctgtttattgtaaagagtgattttgaaaaggattttaaaaaacgtattgagtcaaataagcttgtgaaaatcagtaacgatgcaacatatgaatttaagtaccgagataataagaatggctctactaaagcaattcgagccattatccatgacggagatcaaacgtatcaagcaacttataaagtaagtattgcaacatcctagcagaaaggagaattgtatgttagaagcgtttaagaacgtagcagtaaaaaagaaaaaagacagtaaatttaacgattttagctctgtgaattttcaaaaatctttagaaacaataagaaatgatttgaaaaacagtaaagcggaattagttattgatgccatgttaaaagaagaagcaagacaaaaaatcaaagatattattaaagagaaatatgcagctcatttcatggattttccagaagataaattggttgaggtttatgagtatgtggtatctgaaattgttggaacaggtgttatagaaaggttaattaatgaacgtcctgatattactgatatatcatataactcaagtcacttaattgtagaatctagtgattataaagaaattcatagagacactgatcatcaaattacggaacagtatataacacgagtaatacagaaatttgctcatgcagtgggaaaagagtttgctcctaaatcacctatttttgatggtgtttatgactctgtacgtattaatgcggttcatcaccaaaatacaacagggaattctacaatgtcattaaggattgttcgtccgagattggcattacatgaaggaaactttgaaacatttgctcctacgttcatgcttgaattctttagaattctcatggaaacccgaaataacattgtgatttcaggagaaacagggacagggaaaaccgagtttttgaagcttttgttctcatatatccgatttgaacataaggcaattatgattgaagatgttcctgaaacgcatgtaaaaaaactatttcctgataaagatgtgtttagttggttaacgggacatggggttactgttacagatcttatagaagctgcattgcgaaataatccacgctggataatgatttcagaattacgtggtaaagaagcatatgagatgattcaagcggtgttctcaggacatcatattgttacttctttacactctgtagatgcagaaacttctccaaaacgacttgttaatatgtcaaagatgggataccaatttgatgaaaaatctctagaagaggatattttgcgctattttaattttggatgccatattaagcgattggtagtaaaaacaactaaacaagggaatgtacagattaatagagttattcgttatctagcaaaggttgtggaatattcgccagaaggtaacagaatggtatttgaacaaaaatataaaaatggtaaatttacttattcaacaggaaatctatctgatcaattttatgaaaagttagcggaaaatgatatgaattataaacttcctgattttaaggatgaagtagccgttaaaaaggatttaatcattagtagataaaaaatggaaaactccgagaaaggaggtaaaggtttgaaaatctctacttttaatgcaaaaacaagaaaaaagaaatttgtgaatgccgaagaaattaatgcattcaaggtagcatatgggaaacccttaaacaaaaaggattatatgagatatgcagctattccaggtctagttacaggggtattttcttttctcttactttatatatggtggctctcattaattttaggattgatgggggcactatacggattgaaagtgctaatgcctaatattattaaaagggcatatgagcgtgattcatttagggaaagaaataaatttgtcaataatatgacctctctcttatcgaatgaaaatcaaacattattaatctccttaaaacgagcgattaagcgtgcaaatggggagttgagggaagatttaaatatattaatggcaaatattattggggcggatcaaacacaggtgattcatgcttttaaacaactgtccaataaatatcgagaagatattacatttgatcagtatttagaacaacttgaaacatgtgttttagaggggagaacaaacctggagacattgaaagatattaaaactcatcacaatgaaacgaaagaaaaaaaggatgactatgcaagaaagaaagagggccatatgaaagatatgaaaactctttgttttattatagtagtgttcatcttggcaattactgtttcttttggtgttaatacgtatataacagcatttgcaagacaccctattggctgggttacgggtggtatttatatgagtacaatatttttcttctttaaatcctttactgcatactttttcgatgattcgataatggaggtcaaagtatgaagatagtaacagctaaaagtagtaaaaaaaatcgttacaatcgattactggcggaagaagatttatatagcatgttagaagaaatgggaaatacaaaggcaatgattgataaatttcaaaagagacgattgttacaatcatttgttatgtgtattttcggattgctattaggtttgtttctctccagttggtgctacctcatagcaattggtctaccaattttcttgtatcgttctaaatatacacacgttaataaggtatatagtgcttttaaatttgaaagacatttaaatttttctaaattcactagattattaatgccttacttgaaagaggcgggtgaatcagtgagtctatatcaagtttttcgtaaaatacttaatcgtatggaaaagccagtagataaaaattcgttagctaaattaatgtcggaaatgacagacaaaccaaatgatattcagccattcaccgattatgctatgcgttcaagtggtagcgatatgtcaataaactttatgcaacttgtttatgattttcaacaaaattcatcagatacaaacgttattaatgagttaggacaaatagcaagtgctgagttacaaagagcaatcgatgaaattatcgcttttaagttaagacgatttaatttcttccctacgaaaatggtaatgagttctttcatattagtagtagggtttgcagcagcggtattggtatatcacctatcatcaattaatctctcataaataataggggagggtgaaatgaaaatgagtgggtgtaaaatatgttagatggttcaattatgacaattgtaaaatggtttgtagggttaatgttaatcatgctgatggttgcagtaacccttttcggcattcaattgaacgatgtaaattcttataaacaacaggtgaattatcaaatagaacgacatggtggattaacaaaagaatctattcagaatttgaaggaatatagtgatcgtcaatacaaaggagcttttactataaaaagtgagcaactaaataaaaaagttaattacggtgacgttgttgattatcaggtaatagcaaatttgaaaatcatactttttaatttacctgatgtgaagatggaatttcatggatctgcaatctcgcaagtacgctagagagtaggtgtttgagaaatgctagaaaataatacttttcgcttaatagttcttatggggggagtaatcacacttattgcgattataacaatatgtttagatgaaaagcctaatatggaaggtttattccatcattttatttctcaaaaaaacacaaagtattaagtaaaggagtcaattagatatggctaggaaagttggtaaaaatgaaaaaacaccattgcagaatgcagcagcggtgcttttaaagaaacaaggaacgatatatgaggaatggtctcaaaagattgtaagtgacaattgcttatctctacttcaagggggaaatcctgagtggagaaataagatgttagaaggagctgcgatggatctcatcgcagcttctgttgttgaagaggaaaaaaagaacaaaacacaaagtcaatcggatgcacaaccgaaacctaatcatttaactcaaaataatcaatcacataaataagaaagtgggaatttaaaatggatctattcaatatttttgctatcaaattattaacttacaatgatttctttgattctgtaagtaatgcattaacatcttggtctggaaagttacaaggacttggtatagcagttattattttctgtgtatgtattattgctttcatgttcatgttcggcgaagggccaagccgtacagcgaaaaaatggctactttacattgttgttggtggtgttcttttatggggagcaggaactttcgcaagtacagttcaaggcgttacagctggtttctaagaaacacactgaaagagaagcttactaattgtgggcttctcttttgttttaaaaaaattctatatttgaaatgaggttaagagagtgtatattgtagagtttttacaaaaagaacaatcaaaagctttcaaaaagtttttaaggaagaataaagcagggaacggaaaacaactagggttaaaggcagcagaagagttaattcaaagatatattgaacaaaatcaacaatctgatcaagtgctactgttattgcaagatgttgagaatgaaaaggcatatgaatttgaattaccggtacaagtaggaagtgaattttctttactcaatgctatttcaaaagaccttgaaaaaggaacagattataacttaggaatggaaatcaaacaaggtatatatgaaagttacagagctgaagaaggtggagcagttatagaacatgaggaaggagcacctaaaaagaaaaaaggtggcttgttcgctaaattgtttggaaaaaaggaagaagtaccacatggtgataatgaagtgaaaaaagagtttgcaggtgtagaggaaaatccttttgaagaaatgcctatgcatgaattgaaaagtaggggaacacatcattttgaggatgaagatattcaggggctacaagaacacgctgctgctttagatgaaaaagaagatgatgatccatttacaattgaagaagaagaacaagatgaattacccgcaggagtgaacttggaaaaagtggctgaagaactaccatttcctacaaatgaagttgattcagttcaaagtatagaagaagagctatttagtaacggttcagacgttcagaaaacaaatcaagagcctgtaattgaagctcagaaccaaggtgtaacattccctgattatgaagaatatctgaaccttagtgaagttgagacaaagcaagaaagatatgattcacgatttactatcaagcacttactaagtcggtttggtatgagtgaggaagcaactacagggcttgaaaagaaaaaaatgcaatatgtaaaaaacgtgttaagtggaaaagattttttgctgattcaagataaatattaccaagaagtaaataatttgagagatgaaatccgtttggctcttgaaaatatttataaagaagtcatgatgcgtgattatcaaaaagaagctgaagaaaggctgcaagacatttttgaacaaggtttccaaacaaggttagcagagttaaatgagtttgagaacaaagaaatgcaagaaatgcaaaaaaaattatctgtatttactgaaaaacaaagattagcattagagtcttttaaattgcagcaagaagcagaatttacggcatatcaaacagaattagaagggcgtaagaatacgttagtaagtgcgtgtgaagaagaattaaagaaagaaaatgaaattgaaaagagaaaagcaactttagagaaagtgtatgagttgaaagtagaaggcaaaaaagaactgatcaataaaaagaacgagtatttatctgattctatagaaatgacagaacagattatgaacgctgccaatgaacaacaagaagtggggtttgcggttttagaggataaaatgaagcagttaatccctgaatggaaagaagaaattcaagcagagcacgataaagaaatgaaagaacgtcaattaaaaatagaagaagaaaagaacagaattgaagtagaagcactaaacttacaacaaagaaaagaggaagcgaaagaggtaaggagcaccgatagagaacagaagctattgaatatcatagaagatttaaaagaaaagttattaaaagctcatgctaacccagaacaacagccactacaacaaccagtgatgatgtatccgcaacctgtacaacagccagtatatatgtatcaacagccagtacaacaagctccaatacagccacaacaacctgtaatgcaacaacaaacaaaaacgtctacaaaaaaacggagaacatttttagctagactaatggactctgagtaagtggttaataaggagggaatgcgaaaatgacactattaaaattcaagcggaataagtaccttcatcataattacaatattgatggtgaagacctgccacaagaaaagaataggataaataaaaaagcactcgcaatttcttcacttgcggtgctttttcctttaggtggactaaattttgtagcaggtacgtactacgccattgtaaatgaattatcaaaaacggttgaaaagccaactatttttgatgtatttggtacggattgggagaaaggtatttcaattaaaaatgtttttcttcctgttctgcctacaaatatgtacttgtttggcttattagcttctacggtgatgggttttttggtgtattcaaaggttaattatcgaagtgacgaaaatgtagcttatggtcaaaagggggatagccgttttactacaattgaagaaattcaagaacagtatagagaaattcccgaaaagacggaaatgtttgaggggtatggcggtgttcctgtatcacattataagaacaaatattatgtcgatacagatacagtcaatacagcaatactaggggtttctcgttcaggtaaaggggaaacgattgtcgtaccaatgattgataatttgagtagagcaaaaaatcaatcaagtatggttgtaaatgatccgaaaggaggcgcgacacgttcctaagtgaaaagcttaggcactgtcgaactcaacagttcagcagtgaactgtcattttgagaagtcaaatgaaggagtaacgtctggaagggcttcccttaatcctccgacatgcaggaaagtaagcaagtactgaactgtgtgaagctcggtgaagtcggttgaaggttaccgtaaattagtatctctaatacgaaagctattcagcggtggatggtgtaactgatagaccggaggtctataaaacactcaaggttaggatgcgcgatgaactagaggcgatcgctagtaagcgcagacgaatccctgatggtacgggtctatatcgggagggaatcgaaaggttctctgacacaaataagtgtcgctactgtgggtgagtaaaactctcctttatgaaagcccatatatcgttacaggcgttattaaggtagcaggctcataggggaaacctaaaagtgtatgtacagataagaatgacggaacgtggtaagctgccgacatggagggcttgttctctttgaagtgttgccaaggaaagtcacaatgagattagttgtcgatataacttggtttaacggcagtgaaagtggtggcacagtaccgatgaaacgtgtaatgaacgtggagggatagccactagtcgattgaagattgaaggttactattggttaacatggtttcgagtaagactaagagatgtaatgctccaaagtaataaggaggttacagcccatgttaaagaaaaccaagctaagacataacgaatattatgatacacaaaaaaaagtgtatgacaatttatactcgaacagtcttaacggtaacaatttctttcaattggaaacgatggaacgccgtatgcccggaaacgggcgcgtacggtgtgaagtgggggaaaagctggagataatctcaaaggcttacctatcactataattgtatagtgcatctaaagagacattagaaaaacgtgggtatgatgttcaagttttgaatatctcagaacccttacaaggaatgtcgtataacccgttacagttagtcattgatgcatgggtgaatggcgatgaccaagaagcggctaaacgagcgaatacattaacattctctctttataacaacccaaatgctggtgataatgcattctttaatacatctgcacaaaatgcgattaacggtattattctcgctatcgtggactattgtgtgaagaataactgtattgaaaagattacaatgcacaatgtatctcaaatgctaaatgaattaggtactttttattataaagagaagcctgatgattttaccgaaaagagcgcattagatgaatattttaagagtctaccgcaaggtaatgtcgcaaagatgcagtatggatcaactagctttgcaggagaaaaagcaaaggggtctattctagcaacagccaatcaagggttacaaacttttgcggataaaatgtttgcaaaaatgacttcgaaatcaagcttggatttaaaacaagtaggttttcctaaaaatctattttttcagttggatgaacgatttttgaataagcgtgtaacggtatcttttcataagaataaccaagaaaaaacggaaattttaagctatgaaattaaggtgaaagccttaggtatgtgcaacatgaactttgatgaatccctagaagatggggatttattactaattcgttatcaagatgtagaaaaccaaaaaaagaagtacagattattttatagcttacagtttgaaaaactgctagatgaaaaggggcaagttgtttatcaaaagaaagagggatgcgaacataaacctgagtatcagcgtcaagtcacactgattttaaaagctaatacttttcctttacaaccgaaagcgaagttatcgtattccaataagcctacagctgtatttatgatcgtccccgactacgataagtcgaatcacgcactagcaagtatttttgttaagcagctgtatacagagctatcgatgaattgtaatgatacaaagggtaaaaagtgttataggcgtgtccatttcttactagatgagtttggtaatatgccacctattgatgatatgggtggggtattaacggtttgtgctgggcgtaatatgctgtttaatttggtgcttcagtcatactcgcaaattgagaaactatatgataagcaagcgaaagaaatcaaacaaaactgtcaaaatcatctttatattatgtcgacagatcctgaaacaattgaagaaatttcaaaacgtgctggacatgaaactattattggaaaatcttccaatgaaagtcacttggatacagataacaaggtaacgaaaagtgcagaccaacaacgtatcatctctccagatagattatcacaatttcttgagggagaaactttagttattcgtgcattgcatagacaagatttaaataggaaaaaagtgcgaccatatccgatttttaatacacaaggaatgacaatgccttttcgttggcaatttctatcgagcttgtttgatacttcaaatgatttaaatgatattgatattccttccttacatacaggattagatttaacagagctatacctaaacttcttggattttatattaaatccagttgcgaaaaaggaatatattaaaaagcaacaagctaatcctgtagtgaaaaaagagcaaacagatattaatgaagcgattaaatcgctcattggtcttgtgaaagagaaaagaaatagaaacgacactgaagatattcagaaacgacttgtacaaatgctattagattatgcaaaacataccatcgttccaaagacggaagaagtgaagtttttaaaagaacattcttcagatgatgaaatcaagatgtatttagaaaaaatattggacatgttggtagagtaattgatttgaaatcaagcagaaaggtagaaaagtaatggctactatgaaaataaaagaatggatgttacgtagtaaaaaatctttagttctagggattttagcagtcgcaatgctatttggaagtttcacgttcacaccgattgcgtatgcttttgattggtacaaatttcttggtctgaaagatgtggatacagaaaaagcaattgtctttttaaaaaatgagtggatacaatatgctgattttttaggttctatttggcaaacaattcaaggagggataataaagacattactctatatcgtatcagcgctagaaggactaattcctgacactttttctttttttgatgtgctaaaagatgcaggattaaatgactttgcatcatctattataaagggtttattctatgccttattcgtattagttgtcgtatggttagggattagaacaattattcagcataagcccccacgttttaaatcagtaggagttaacattattgtaatgattggcttactaggtggattaaatgagttgatggcggatatgcagaagatatccactgatttcttttcggaaacgacaaacactagtaaaacaaaagatggattggcttgggatttagtcaagcagaatacagctgatctgatttatttaagtaaaacaggattcgatccaatacgagggaaaaaggaaaatgaaccagcaatttcatctacagataataaaccgaaaaatggaatgggaaaggaagtcttccttcaagcaaatttgggggatatagtgacaccagagtctatagaagatttatcaaagcaggatggaattcctgaagaaacgaaatttttatcttataaaattacaaatgatggggataaagaagtaatagaagaaataaagaatagtgtgtttaatccatttaaggataaatttccagggggctatgttcgttatccaatgaacttcgggactatatttttggggttattagctctaggagttgcttatttatttacagttttcgtatttgtgatgacgatatttgaaattgccatgaagaaaattattgcgccaattgtattcgttacagatattgaaacgggcgaaaaaacaaaaatggtaatgcaggatatctttaaagggttcttaatatttgcctttacaggtttaaatttaagattctatacaattatcgttaactatttagcagagaaaaacatcaatgcgtttttatatatcgtagcaatggtttgtttaactgtcgcattaattaaaggatcagaatctattttaaaatactttggtgttgatgttggattaaaagaaggaaagaatcacttaatgggtatggttggcggagctatggcagcgaaaggagctgtgaagggcgttggtcgtatgtttagtggtgcgaagaacctaatgagtggtggaagtggacaaacacgagaggatacgcctaaacgctctgaaatggactcgaatcatgagagtgctgatctacatggagaacaaaagaataatgctaaaggcggcggtatgcaagcgaagaaatttgctagaaatacgggcgctgcgttgagttatgctactaatcgtggagttggcggcatgatgaatgatgcaggaaataaagtggctgagactgttggtggcgctgttgataaagggaaagaaaaagtatcaggcgttgcgaaaggcgtatcggacggtgtgaaaggtactgtaagtgaatttaagagtggtcaagagcaaggtaaagaaaaggcacaagaaaatgctgatcgtcaaacactaaatacaataggtaaaggtattcaaaataatgcaaatgcaggtatagagccatctgctagccctaagatggctaatcgttcgaatgtagcttctatttcaaatgaagggcagcaaggcaatgtaaaaggcgaaagacaaacagcggaacgagaaatcgaattacaaaacaaactaagaaatacaggaagagaagaatcacagcaaggcaatgtaaaaggcgaaagacaaacagcagaacgagaaatcgaattacaaaacaaactaagaaatacaggaagagaagaatcacagcaaggcaatgtaaaaggcgaaagacaaacagcagaacgagaaatcgaattacaaaacaaactaagaaatacaggaagagaagaatcacagcaaggcaatgtaaaaggcgaaagacaaacagcagaacgagaaatcgaattacaaaacaaactaagaaatacaggaagagaagaaggacagcaaggcaatgtaaaaggcgaaagacaaatagcagagcgagagattgagctacaaaataaattaagaaataccggaggtactgaagcatcgcaaggaaatataaaatcagggacacaaacagtacagcgtgatgtgaacgttcaagatacattaagaaatacaggtggaacaggaacaatcaatagtgatgcaaaagcaggtgtagcaacagtacaacgtgatgtaaatgtacaaaacaatgtaagaggaagtgaagcggtaaataacgatgtaaaagcaggctcaaccacggtacaacgagatgtgaatgtacaaaacaatataagaggaaatgaagcggtagagcatactgcaagggcaggagcagcaacagtacattaaagaaaaaatctaagtctgaaataggacttaaatattaatatacgaggaggaaaatcaaatgaaaaagaagtttgtacccggtattgcatcagttgtaggagtaagtattttattaactggttgcggtagttataaaaacgaagcaagcggagcaaatgcaaaagacgaggcacctagtaaacaggttttaaacttatcttcacctactgaaatacgaacaatggatacggctcgtgctacagatactgattctggtcaagtaatgagaaacgtatttgaaggtttgtataatcttggtgaaggtaacaaacctgttcctggtgttgcaaaatctcatgaagtaagtggcgataaaacgaaatacacattccaattgcgagattcaaaatggtcaaacggcactcctgttacagctaaagattttgtgttcgcttggcaaagagccgtagatccagcaacagcctctgaatatgcatttctattctttgatattaaaaacgcaacaaaaattaacaacaaagaacttccagccgaccaacttggtgtaaaagcagttgatgaccatacgtttgaggtagaattggagcgtcctgttccgtattttattagcttaacagcgttcccaacatttctaccaattaacgaggaattctttaaagcacaaggtgataagtacactttagaagataatacaatcttgtacaacggagcttttacactaagcgattggaagcacgaacaaagctttaaattcaagaaaaaccctacctattgggataaagatactgtcaaactagaagaaatcaattttaacgtcgtaaaagaaaaatcaacagaagtaaatttattcgagtcaaaacaattagatcgtataaaactaacatctgacttcgtcgataaatataaaaaggatgctaactttaaagaacgtccaaacgtaggcgtacaatttttacgtatgaatcaacaaaacaaagtgcttcaaaacgtttctgcacgccaagcaattgatcaaacaattgatagaaaatcctttgtaaatacgttattaaatgatggatctacaccaacatttggtctcgttccaaaaaactttgcaaaaggacctgaaggaaaagacttccgtactgcaaatggcgatttaacaaaagttgatacaaaatctgcacaagagttatggaaaaaagctaaacaagagcttggttctgaaaagataacattagaattattaacgagtgatgctgaccttgataagaaaactggtgaattcttaaaaggacaactagaaaagaatctagatggattaacagtaaatataaaaccgcaaccgcgtaagcaacaagtttcgcttttattaaaaggtgactacgaaatcggaattgatggctggagccctgactttgcggatccaattacattccttgagctatttacaacgaataacccttataacttagatcattactctaataaggaattcgatgaaacaatagcaaaagtgaaaacaactttagctggtgatgaaaaagctcgctgggaagcattactagcatccgagaaaatattatttaaagactctgttatcgctcctctttaccaaaaaggcgaatcttatttagaacgttcttatgtgaaaggaattgtgcaagtagactttgcagggcaattaaacttcaagtgggcaaaaattgaaaaataaagtgaaactttaataagtgggggtttcttcatccccacttattattagcccacaccaattgtttttttagcaaaatatattaaaaataggttctctcacacatgagaatccgctttttcaatatattattctaagaaattaacaatctatttttattattgacatatagttctttccagtgttaatattctaaataatcaaagaaacgaaatatttcaccatcaaaatataatgtctactacgttgaaacatataacgatagattatagatcaacatgtatatacatatagaacacctgattacctataaacaaatatttataataggttttatctccttctataactacttcaagacatggacattatgacgttacgaacaacacatttagggaggaacgaacaatgaagaaaaaagttatacctgttgttgcatctgttttaggggcaagtctattactaactgcttgcgggggaaataaggataatgcaagcggagcgaaagcaaacgataaagcacctgataaacaggcaattaacttatcattcgcttcagaaattccaacaatggatgttgcaaaagcaacggatggggaatccatgaacgtaatgcgcaatgtttttgaagggttatatgcaatgggagaagataataaaccggttcctggtgtcgctgagtcggttgacattagtcccgataaaacaaaatatacattccatctgcgtgattcaaaatggtcaaacggtactcctgttacagcaaaggactttgccttcgcttggcaacgtgccgtaaatcctgatacagcagctgaatacgcattcttattcttcgatataaagaatgcgaaacaaataaaccaaaaacaattgccaattgatcaactaggggtcaaagctgttgatgacaaaacgttagaagtacaactagaccgtcctgttccctacttcttaagcttaacgacattctcaacattcttaccaattaatgaagagtacttaaagtctcaaggcgataaatatggtttagaaacaactcatttaatttacaacggtgctttcacattagagaactggaaacatgaacaaagcttccaattgaagaaaaaccttaactattgggatgctaaaactgtaaaactagaagaaatcaacttcaatgtcgttaaagataagtctacagaagtgaacttatatgattcaggacaaattgatcgtgttgctttaactgcagagtttgttgataaatataagagcgatccaaacttcaaagaacgcgctgaagtcggcattcaattcttacgactaaatcagaaaaatgaaacattaaaaaatcaacatgcacgccttgctattaacggcgcaatgaataaaaaagcttacgtagaaacaatcttaaataacggcgcggttccagctgaaggaatggttcctgcgaaattcgcaaagagcccagaaggcaacgacttccgtaaagaaaatggaaatctagtcaaggatgatgtgaaaacagcgaaagaaaactggaaaaaagcaaaacaagaacttggtactgacaaagtaacaatcgaactattaacaagtgacaatgctttagctaaaaagactggtgaatatttaaaaggtgaattagaaaagaacttagacggattaacagtgaacttaaaaccacaaccacgtaaacaacagctaaaactactattaagtggtgactatgaaattggtattgacggctggggccctgacttcgctgatccaattacattcttagatctatttacaacagatagtgcttataacttcgataaatactctaacaaagagtacgatgagctaattcataaagtgaaaacagatttagctggcgatgaaaaagcacgctttgaagcaatgaagcaagctgaaaaaattctattacaagacggcgctgtcgctcctttataccaacaaggtcgttcttacttacaacgctctttcattaaaggacttgtaacaactgacttcggtggtgaatttaactacaagtggacagaagttgcaaagtaacaaaagtaaaaggtatcccacgaaggatacctttttacttttatacaactttaactacagagcttcctcttccctttgccattccttttatagctaaaatcatacctgctactaattgtataaccaatacaataactaataatgaaataatatttctttctaaactaactcctccaaatattattgtataatagccatttcctgcatatattgcaggaaataattcactgattgtttggtatgttttagaaagcatttcatgtggtacaattacacccaaacttacaagttgtaacgatagtgagatgatattgaaaatcatacctgcatctccaaaaacagttacaaccatttgtgttaatgaaagaaaggcgaagaagactattgtcaataatcctcttttccttctttttgcattgaaccaaaactcattatacatataaacacaaacatcaaatatgttctccacgtcaaagaaggtatatgccctgaccaaagatacctaactaaataattaactcccataatacaagacgatattactaaacaaatacttattagttttacatatttgagcatatcttttctccttattctttatttttctacttcttcaaattgtagattcaccggctcttctaaaagtgtttcataaaagttctctgccaaatctgttgaaggaattttttcatctacttcatcaaatcgaatactatctagccacacacaaccttctcctgataataaaacaccaaatgcaataccaagtgcttcttcttttatatctaatacaaccgagtacgattgccagttattcgtatttttaatggggcgattttgcatattatccatagcgagcgattctgtatcttttccatctactcgcatccacaatcctgcccaatctcttacattttcactcttaataaatgctgtaaaacgtaatctctttcctacatatttatccgctcggaacatttgcattaatgttgaaaatcctccgtgcgtaacattctcttttgcttttatgtatgcagatactttcccctgatggacaacttcataatctaaacccatctcatattcagcaggatgacttccacttaagatccatcctttcggtatacctttttgcattgaaacaccctctctttctatataaaatgactgaaagtactttcgatatttctttggtggcaattgaaacattcttttaaaagctctcgtaaatgcctcttgtgaggaaaaaccgtattgcactgcaatatcaataacagctctctccgttgacactaaaacttgcgcagcatgagttaaccttctctttcgaatataatctgttacactcatcccaacatatctttgaaagatgcgatgaaaatggtacatcgatactgcactgtgagatgccactctttctgttgtaagctcctcatgtaagtgattctctatatattcaattgatttttttattatctctttatattcttcatgcattttagcccctcctcacaacttcaatttaccatatacatacaaatcttttttgatttaaattgcggattagcccttgcaactacagaataataatttattttcaacacatacataattacatgtttttgggaaaaacttgtatagaacgaatttacataaggaggaatttataatgagaattctactatcagttttattagctcttatgctagtacctgcattaacaggatgtaaagctcctgcaaaagaagacacaacttctaataaaaagacgactgaagaagcaaaaaatgaggctcctgcagatttaaaactaaacttcaatgaattcgatttaaaggcagactaccaagatacaaagaaagactacgaagcagactataaaaatgtagcagctgataagaaaatggaagcaaaaattgaagatcataaagcagatgtaaaattaacaggagacgaggctatcacaaaattaagcccactcttacaagaattaaaatttgataaaaatactgctgaccaagaagtaatcgatcaagtagtgaacgtgttcaaacttgataaagactatcaaaaatttgatttagaagttgtcttctctgatggaacgaaaaaagaatacaaaagagaaataaaataaagaagtaggcggtagtaagaagaaaaaataaccttgcacaggcaaggttattttttcgtttctgcttgaaaacgtttatagtatgtcgatgctgttgcaaaattaatttctatatcacgaatcaacgatgaatcttcttctttagctaacttctgtaattttttcatcgcttgttccgattcattcaagaaaccaacatatacttcatgttcttgctctttcgacttcggaacacgaatttctttacgtatatgatcaatatcttctaacatgctcgttgttaccttttgcacatcttctttatatgtagcagtcgttatttccttaccgcccttttcttttgctacttcaaataactgcagtgctttattaatttctttattcattttcatatcgtatttttcatgtactgcacggtattctttcatctcttctgtttgttctgtagattgctctaccttttctttcggttctttcgtatctttatttccattacaccctgctagaaggagcattcctcccattacggcaatacccaaaaccttcttcatctcttcttctccttttatctacaactattactcattatagtttcttttatctccacttgttattataccgagaacatcctactttttacacttaagacgacaccgtaatatatatataccaacatgtttgtcacagtatcgtcactttatacaaataacttttgcaatgctttactacatcaccttacaaaactgtatgaggtatttcaaagaaatgaaaaaagaactgattcaaacattccctttgaatcagttcttttttgttaagcctctagattttgtttttgctgcagttcaaactgtttctcacttcttctggccataaatagataacataacactgctcctacttcacaaagcgcaataacaatacccatcggtaatgctgtattacttccaccgatacctactagcggagcaacaagagctcctgaaataaactgtaataaacctaataaagctgatgctgttcctgcagcttgtttctgatttctcatcgctaatgagaacccagttgttgatacaaccccgacacttgatacgacaaggaataacgaacataaaacaccaattaaacctattcctagtacgattgtcagtagtaaagataggccaccaacagctgcgataataatacccgcaacaaataatgtcttctcattcactttccccgctaaacgacccgttacctgactagcaataataataccgaggccattaatcgcaaagaataaactaaattgctgtggtgatgctccgtatatgttctgcaacacaaatggtgagcccgaaatgtatgcaaacattgccgctgttactaatccttgtgacaatgcatatcccataaatagacggtcctttaacaattttccgtacgtcgccaaagtccctgacaaaccacctgtttctctttcttcaggaggtaatgtttcacgtaatacaaaagtagctgagattaacatgaatacgctaattgctccaagaacgatgaaaacaccgcgccacgttgtaaactgtaacaattgccccccaataatcggtgccaaaataggtgctgctccgtttactaacataagcagtgagaaaaacttcgtcatttcagaacctgagtacatatctcttaccatcgcacgtgatataacaatcccggctgatcctgaagctccttgtaggaagcgcaataatactaatgtccaaatagatggcgcaacagcacaaagtaaagaagaagcaacataaataataagagcaataataagtggtttgcgtcttccgtaaatatcactaattgagccaacaaataattgccctactgacaacccaagcaaacaagctgttaatgtaagctgcgctagggatgcacctgtttgcaagtcatccgttaacttcggtaatgaaggcaaatacatatcaatagataatggcccaatcgccgtaagtgtccctaatacaagaatcatccacaacctgtttgcctttacaggtttatatatttcgtgattaacttcattcactttttcaattcaccctttcctatacacactgaatcgtaacaattatagttacatcataaacatacgtcaagtacagtgcattttcctctttcataatgtaaaaaaagcgatagaaattctaccgctttattttttcacattgctattcgtaaatttagataccgaggccatcgtctctcccgtatctaaatatgtaatttgaattggatctcctacttctgtaaacatagcatatgggaatttcttcaccggtatcataaataccttttgttcattttctaaaagtacgtacacgattgtattttcacctgatttttctttatatacacgttgtacaataccttctttttgcgcttcttttcctgttgaggttggtctaaatgtatcaccattaccgctcattacgtttttataattctcaagcgcttctttctgcgaagaacctgtcgcaaatatttttgcattagcagcatatacaactgtatgcgcacgtactaggcctccgtcatcaacaaccggaataatccaagctggtttaccgtatacgttataaatgacaggcattgtcccatgccatttctctctcttaaaggaattatctactacttctgtagctgctgaaccatccataatcccctttacttcttttccattatagtaatatagcttgcctgtgcgtgcatctactaatgaatagcctagagctgaatctactccttcttttggagaagtaaagtctgtaaaataatacagtgttccatctttaccaaagatcggggtcacgccttctttcgttccccactcagtcggaattttcatatctgtttgcgagaatttcgtattccaaaatccgtgaatatatttgccaaagtacgtatttaacgtagatgcagtctcatgatttaatacaccatcaacaaatttaggtgcctttcctttatcatatcttttcacttcacctgtttgtgcatctactacgacaacaccttctacctcaaatccagatcttcctgaaataaattcaccatacgtcattgtataatatggttttcctttatcatcaacctcaaatttaggttttcctttaaagattaaatttggttctgcttgccttaccacacgctctaaattattaccaaaaaacatgcttggcacatatttcattttataaccgaggtgcagtttcgcttccgcatcaggattcgtacctgacatcgttacgtaccctggaattgtctcagctttacgcgctttaaaaaatcctgaaacttcaatcggcgctacatataaagcctcgccgtttaccatttgtggcgttaattctcctagctcaaaataagctacttttggaatatcaccaaatacttttttcatcttattctccgctgtctttggcggcactgtaaacggctggtcattttcagtaaatggctctgaaatatctttctctaccttaacaacagaatcatatttcttttgcgagattactatatcgtgcaaataaccaaagtagccgtaacttgcgagtaaaataaacattagaagtccttttaatgtaccttctaatttccctatttgatcttgtgaaaataaaacaagcccaattaaaattgctactgcaacagaataatgagtaagaatcgaatctactcgatcatcaattagccaaaagtattcatagattgcaatacctatccaaaataaaacaggaataactaaaatagatgatttcttaccctttacaaccttcttatctcccttcttatccactgctcgaagcttactactacttcttgtccatggaatcaaaaacaaagtaagaatagctaaaactacaaatttcatcaaaggcactgtccccttttcttttgtattcccttttagtataacaaataaaggttattaaggtgaaaataggaatagttatatttttttactacttaatacaatcccgctcactacatatagaatagatgcaatataaaaaattgtaccaatcgtaaagaaatctactaaatatcccgtggcaataaccgctactgctccgccaatggatgtccacacatggtattttccaatctcataaccagccttttcctgcgcaacctttcgtgctaacgaagtcttctcagtattacgctgcacagcacctaaaacgcccattacaatttgaagaatatacacatgccaaacttccgtggcaattggaaagcaaagcattaagattgccatggaccaagcgtatatgattaataattttttatcccctacttgatcagatacctttcccactagtggatatacaagtgctgatgttaaagcaaataagccatacgcccagccaaattgcgagaagctatttccaacgtttcgaagcaataatatataaaaaggaaataccatacttcctgccatcatgatgatactttgcgaagccacaaatcttctatatgtcatttcgtatactccctataaaataaattcacaaatctctcttctgaatctatttccttctttttcttgagaaattcttcaatgcgaggatatgccctctttaactgctctttcgttggataagaataatacggcaaatagtaactaccattatgctttaaagtaacatcaatcatctttcgaatgacatcctctgttttctttatctcactctctgagcgtccctggttaatcaaaagaaccagcgcaaacatatcatctttcgcataggacaaaactgcattttcattcttttccacgtaacgaatcgtaatgttgagtaaattaaactcatcttcatttaatacgttacgtaaatcatctatatactctgtgaaagcatctataggtacaaagtattcttgtaacacttcggtcctatttggattttcatattccataaaagcactatctgatctcataacattattacgcgtctcatactttccatctgtacgttcaaaataacctctttgtatatcccaaaatgtattctttccccaatcactataacgtgataacccaagcaaaaatttcggtgcagctataatattttcttcctttaattcactgtactcttctctcatattttgattttgtgccaaagtataatctgtcacatacatctcttttaaaaatgaatttggagcaacagaaatacgcgctaagtgcatacgaacattctcatctcttttcactttctctttgaaataagatgcgtattctttataatctatcattctcgtgtgcatttcatataattcatcatctgttaacttcagcgtcacatctaaaataactccaaataaaccgtaacccccaatgacatatggaaataactctgcattttcttctctacttacattacgtaccgtgccatctgccattaacaatctaaatgaatctactgtatcaatcagtgcctcatgacgaatatcacgcccgtgtacatttacacttaatgaaccgccaacagtaaaaatattttgagactgcatgacctgtaccgcaaggccataaggatttattttcttctgaatatcattccaggtgacaccactttgaactgtaatccgcttcttctctggatcaaattctaatattttattatatcctttcatatcgagcatcgtgccattcggataatatgtctgtcctccttggctatgttgcatgcctgcgatggaaattttctctcctgaaacttttgcatctcgcactaattttattaacgagtgctcttccgtagcactttcaacacgttttatttttgtcggaagcaatttacctacatcactcataataggatgatcaatttgttttttatacgtatgtacagacgttgcaagcaaaaccgtatatgcgacaatgaccactgctatctttctttttttcaaaggacactctccttattagcaacaaaaagagataccctttctttcaggtacctctcttgacagtgattactttgctgctggcaattgtattggatcaaatttatcatacgatgtaaactttgcatccgtaataatgtgcgctttatcctcaccattgctactcataaccatatctatctttgctgattcatatttaaaatcttttgtaataatatattccccatctatttcttctatctttgcattttggccttgtagcatttttttctgcttttcatccatactagctagcatactctctgtctcttgcccttttaatgcaaacttcagcttataattatctccacttttctccatcttcactttatttaaaatttccgatggaatctctaaattatctaccattccttgagtcgcgttcattccgttagcattcaattgttcctctggtacagacataatttcacccgtattaggatttttcaactgaccagcaattttgccacccacatcataaacaacaacctctgtaccagaaacattcatttcagaacgagaattttttttcttcggctctagttgcattttagcctttattacattcatctctgttccttcagcctttattcccacatcatatgtcatcgttacattttcttcgtttttaaaagcttcattcgctttattaaaaacatccttcgctgttaattccttttctttctgcacagcttcttttttcggttcgtcagtcttttttgttttctcattactacaccctactcctagaccgactgcaagtactaaacttgaaattaaaataagttttttcataacgtcccctccttcccaaaaataatatcatctcttttcctatgaaatctatataattcgtaatatttatctttaaatttatttcctatataacaacatgtttgagaaaaagtttaaatatgatgtaaataataacaactcatttcaggaggtcattatgaaagcgattatttgtacaaagtacggaccacctaatgttctccagcttcaaaatgtagaaaagcctaaacctaaaaaaaatgaagtgttagttaaaattcacgcaacaagtgtatcgactggagattgtagaatacgtggctttaatagccccctcttattttggattcctatgcggatcatattaggtttcagaaaaccgagaaaacctatacttggcgtagagttatccggtgaaatcgaagacattggaacagatgtaacacaatttaaaaaaggagatcaagtttttgcattaacagaactaaaccttggtggttatgcggaatacacatgcgtgcatgaaagtggattaatagcattaaaacctaccaatgtgacatatgaagaagctgccgttattccttttggcggaacttcagcattgcacttccttagaaaaggacagataaaaaaagggcaacgagtacttatatacggcgcctctgggtcagtagggacagctgccatacaacttgctaaatacttcggggcgactgtcacagccatttgtagtagttcgaatttcgatttagtaacaactttaggggcagacaacgtaattgattatatgaaagaagattttactaagcggggcgagcactacgatattatatttgatgcagttggaaaatataaaaagtctctttgtacagatgcattaatgcctaatggaaaatatgtatctgtgaacggaatgatggcaaaggtcagtaaagaagatatgaacctgctaaaacaactagctgaaacagaaaagctaaaacctgttattgatagaacttaccgattagaagaaattgctgaagctcatatatatgtagaaaaaggacataaaaaggggaatgtttcgattatcttaaaataaaatatattccgaaaatatcattgacaattctttttgtacgatttactattagtaccatattcaaaactacatacacatactcttatcaagagtggcggagggactggcccgatgatgcccggcaaccgagcttatgacgtataagctaaggtgctaattcctgcaaaacgagttttcgttttggaagataagagaggaatctatttcgtctattcggcacctctcttatttttgggaggtgctttttattttggaacgtatatgaagggggatttatagatgaaaaaggtattattaagcattgtaagcggagcagtattattattaggcgcatgtagcgtgagttcagataaagaggtaaaagcattagacgagaaaaagattactgtcggtgtaacaggtggaccacatgaacaaatttttgaaaaggtaaaagaagttgcagcaaaagatggtctcgaaattgatataaaagtatttaatgattatgtagcgccaaacgtatcattagatgaaaaaagccttgatgtaaatagttaccaaacgaaatcgtatttagatgtatttaaagctgaacgcaatatgaaattagctgaagtattttcaacagtaacattccctatgggcgtatattctaaagatataaaagatgtaaaagacttaaaagagggcgatgcaattgctgtaccaaatgacccaacaaatgaacttcgagctttaaaattatttgaaaaagcaggggttttaaaagttgatccaaaggctacagaaaaagcgactgcaaaagatgtaattgaaaatccaaaaaaattaaagattgtcgaattagaggcatctcaattaccaacgcaactaagtgaagtgaaagcagctgcaattaacacaaactttgcattaggtgcaaaattaagtccagcgaaagattctatcttccgcgaaggaaaagattcaccatatgtgaactgggtcgttgttcgtactgaaaataaagatgatgccgttgtaaataaattaaagaaagcttatcagtctaaggaagtaaaagagtttatcgagaaaaaatttgatggttcagttttaccatcttggtaggagctgacgataatgattgaattaaaaaacatatccaaagtatttacaacaaaaaaagggaatgttgaggctcttaagtctacttcccttaaagtagaaaaaggcgagatatttggaatcattgggtatagtggcgctggtaaaagtacattgattcgatgtgtaaatttattagaaaaaccaacgacaggaaatatcattgtaaacgaacaagacttaacaacgttatcgacaaaagaactagcaaaagcgagacaaaaaatcggaatgatcttccaaggattcaatttacttaaaactgttaccgtttatgaaaatatcgcattaccgttacggcttgctggcattccaaaagcagaaattgaaaaaagagtagaaaagtatttacgcattgtcgatctttttaatcgaaaagatgcgtatccaagcgaactttctggtggtcaaaaacagcgtgttgcaattgctcgtgcgctatcacatgaacctgaagtgttattaagtgatgaagcaacgagcgcattagatcccgaaacaaccgattctatccttgatttgttattaaagattaacgaagaaatcggaattacgattttactcattacacatgaaatgaatgtcatccagcgtatatgtgaccgcgttactattatggaacatggatctgtagtcgaaagtgggactgtaaaagatattttcacaaacccacaacatgtaaccacgaagaaatttgtaaatagcgcatttgcagcgaaaattccaaaagaggtacagaaagaactacaaagtactggagaaattgtaacactttcatttattggcactacttcaggggaacctgccttagccgttgccacaaaacgtttccaagtgtatccgaatattttatccggtaatattacgcagttaaaacatgaagcatatgggaaactagtcgttcatatgcaaggggaacaaaatgaaatccaccgtgctttatcatttttacaagagcaaggaatcatcgtagaaggaggtagaacagattatgggaaacaagtcctttttggatgaatggggtaaagtcatatgggaagccacaatccaaacctttcaaatgacatctatctcattactcatctcgatccttattgcattaccacttggcgtcacacttgttttaacgagacctggtgggcagcgtgaaaataaaatcatctatcctattcttaatacaattattaatatcattcgctctcttccatttatcattctattattctttattttaccttttacaaagtttctaatgggaacgtccattggcgtgcaaggtgttatcgtaccgcttgtcgtcttcacagccccttatatcgcacgtttaatggagacagctttactagaagtcgatcgcggtgtcattgaagcctaccaagcgatgggcgtttctactataaaaatcatttggcacgttatggtgaaagaagcacgtccctcccttgtactcggattaacaatcgcaacgatcggcttaatcggcgcaacagcaatggctggccttgtaggtgctggcgggctaggggatttagcataccgcttcggacatttacgctacgagcctgaagtaatgtatgcaaccgtctttattttaattatcctcgttcaaggattacaatctttagggaatggtgttgcacgaagattgaagaaagattaaaaaagaaggcatctcaccctggtgagatgccttcttttttatcttttaaatccaccttctgaatgaataacttgcccagtaatccactcggcctcttcacttactaaaaatttaatgagtctagctgcatcccttggctcaccaattctgccaaaaggaaacatcggctttaacccttgttttatctcttcagtcatccatcctgtatcggttggtcctggattaattgcattcactgttattcctaaatgagctacctctgctgacaacgtactagtaagagcatcaatagctcccttcgttgtcgcataagctagttctcctgccataggaccttgaaattgccccgaagtaatattaacaattctaccaccagatttcttatcaaatccccgggaaaattgactactgagcaatgtagtcgcacgaacatttaccatataatgcttatctaattcttcagcagtcaacgtagagaaattattattcgtagaatatgctgcattattaattaatatatgagggtaccctaattgttcagtaactttatttataagctcttttggtgcatcattctgagttaaatctaactccatacttgatactttaacaccgttttttagtaactcttcttttaattgtatttgttcatttttatcaacgccccaaggcatctctttatcgtaagctgtccaatacgtaaaaaatatatcgtatcctgattcagctaattctttacaaatcgctgcccctataccatctagacgacttacccctgtaataactgctactttattttttaattggttcatcatatactcctccaagtttaaaggacgcatattttatataagagatataaactttcccacaaaaaagacagatacataaaataggcacctatccttataaaagggatgtacaagccaaatatgcattccttgaatgatttacagataactaaataaaccctcgcttatgagagcaaaatttatctatctagtagtttctaatcattacaagttcatccacatattgagtctttgtctcctttacatatatctctattcttagtttatcaaagcagataaaatgttacaaaaaataaaacaattattcacaacctatccttgttcacattctctccattgtgaatcttttcacattggatatataataaacgtgtaaatacaatattggagggatttcaatggttatcaattttttaagaactgataaacgtgctactttcatattattacttttacgactttacataggatatacatggttcgctgctgggataggcaaagtcttcggacaatcttttgacgcaagtggctttctaaagggtgctattgctcaagcatcaggggaccaccctgcagtacaaagttggtgggcagatttccttcaacattttgtccttccaaacgcagacctatttagctttttagttcaatggggagaaattttagtaggtctaggtttgattttaggcggattaacaaaaacagctgcatttttcggaatcataatgaatctttcatttttattaagcggaactgttagtgtaaacccaaacctgcttattttgactatgttcattttagttgcagggcagaacgctggacgtattggattagatggctatgttttccctaaacttttccgtaaaaacaaccacagaacatataaattaagtaaaactgcgtagtaacaatttacttttaaaatataaataagaaaaagagcctgaatataggctctttttcttatttatcctaatttaaacttttaatgaaccacgaaagcctctggcagcatagtaagagtctgctccattgtggtacacgaaaacatgtccaaagcgataatcgcaaaatagagcaccaccaagctctctaatatctgaaggtgtttgtacccaactcgatgatttcatatcaaaatctccaagttgttgtaactctcgatattgttcttccgttaataactcaatacccatagcggccgccacatcaatagcgttattttctggtttatgcttttttcttgattctaacgcttcaagatcataacaaagacttctgcggcctttaggactctcctttgaacaatcatagaaagtatattcgtccttttcttcatcataaccaataacatccggctcaccaccagttacttccatttcgttaagtgaccacaatttttcattattagtagtcagctttgcttcaactttagcccattcaagaccttcatggcggttcatgtttttctcaaaacgagcttgcaatactttcaataactcttcacgtttttctactagtaagtcatttttatttcctgtcatattagtcctccctgatgtatgtactgatagtagtttaagtatatattttataataaatcatctcaatatgaagaccgtttcaatcatatgtcttgtacaaacatctattacaaagtcctaaaaccctccatactctcttcaagcatatagtgtgaaaaccacatcaagttctgcttcataatagccacatgaactcctggttggtcagaactatatgccattcctttaaatataattaattctgtatcaacttccatatccattaatccttgatatagatcatatgcatttgtaatcggaattcttgcatccttttccccatgttgaattaaggtaggcgtacaagctgatttaatatacgtcataggtgatgtcttcgtatatatatctggatcattccatggagtatttcctaaatacattctaataaagtaaggtatatctgtatttacataatgggtactccagttagttattccaccgccaactgaaatagctttaaacctgctactaaatgtagaacaaaaagctgataaatatccaccgttgctccatcccataactcctactctatctttatctactatcccttgatcaactagtttatcaactcctgatataacatcgtcgtagtcagcaatcccctgttttctatagttagcttttaaaaattcattaccataacctgaacttcctctgtaatttggctctaaaacgataaagcctttttcaacaaactgttcaatcggatatttctcattgaagcagtctgaaaatatcggaaaagatgcccaagccggaccaccgtgaattactactaataaaggatattttttattagtgtcaaactctactggcgttgataaaacaccttctatttcaagaccatcactacttttccatgagatgatttccctgttacttttaagtttccctttgaaaaagctattttcatccgttatttttttatcgtctaaatagatttcaaaggtttcatttgttatagccttattataggttatatgatttccatcctttgttatagaggcatccattataaagccatctatcttgtcgcttaatgcttccacagtgccatcttcagctagtaatccaatacgataattcgttttatcctgccatctaattaaaattcctttagctgtccactgtaatggcataactgtactatcaaagtttgttagaggctgaattacctctccagtattcatatcatatatctctaacgtactatcttgtatatggtttctatagtaatccttctctcttatgcttgctgtgtaacatattttactgccgtcaggagaaaagcaaacactccctcccaacaacttatccacattcagcttttgtagctctccagctttaatatggagtatgtatagatctccatttatataatctgccatatttgagcttggtgtcgttataaatacaacctttttaccatcatttgaaatatcaaattcatggatatgaaagtccttaccatccgttaattgataaacaactctgttctcgtgttcatctgtatcactttgtatcaccttttctatttcaatgtaatataaacaatcattctggtgttccttacctatatgttgaaaatctccatatagctccttacgtttctttatctcttcacattcttttgactgcgtaacataataaagccccttgccagtaggaccccatttgaatgtactgactccttctttctcatcagtaatttgaacctctctataatcatctagtgacttaacaaatatctgattttccccgtcaccaactggactaagatatgcgatacacctagcatctggagaccataatgggtgtgtactatctatatcaccatttgataatgggtaactctgcttcttatctttttcatatatccatacatgattcctatatgtattgtctttccaatcagccgtcttcttaacaaatgctacgtttttaccatcatcacttatgtttgtacttgatacggttggtaatgaaataatctcttctatacttaaatatgtttttgctttcactttcatataataagcccccttgtaatgtccatgaatctaccgtctcttcttgtcgtaataaaggaaattgttcacggatacttaaaatagtaacggaaaattcagataaataaaagtgaatccgataaagtaaaactttaatctatagggctctttccgcttatcaattttagatgttctttttcgacacaaaaatacccctttagataaaatatctaaaggggtgcaaatttgtaaatttattttaaagctataactatatttattaacctaccaatctcctactcaacagtaacagacttagctaagttacgtggcttatcaacgtcacactcgcggtgaagtgctgcgtagtatgagataagttgtaatggaataactgctactagcggtgctagcgcttcgtgtacagctggtaatacgaagctgtcaccttccatttctaagcctttcattgagatgatacatgggttagccccgcgtgctactacttctttcacgttaccacgaattccaaggtttacgtgctcttgtgtagcaagtgcgataactggtgtaccattttcaattaaagcgattgtaccgtgttttaactctcctccagcgaatccttctgcttggatgtaagagatttcttttagttttaacgcaccttctaatcctacgtagaagtctacgctacggccgatgaagaaacagttacgcgttgttgctaaaaattgttttgctaatgcgtccatttcttctttttgatcacaaagttctatcattgcatttgctacaagtcctagttcgtgtgttaaatcgaaatcaagaacttcaccttttgctttagcaatatcagccgctaaaattgaaagtactgcaagctgtgctgtgtaagctttcgttgatgcaactgcaatttctggtccagcgtataacggaagtgtataatcagcttcacgagaaagcgtagaaccaggcacgtttgtaattgttaatgctttatgccccatttcatttgtttgtacaagtactgcacggctatcagctgtttcaccactttgtgaaatgtaaatgaagaatggtctttctgttaataatggcatgttgtaagagaattcacttgccacgtgtacttcaactggcatttttgcaaacttctcgataaattgttttccaacaagacctgcatgataactcgttccacatgcaatgatgtaaatgcgatcgctatctaaaatcgcattgcggatgtcttgatttaattcaatttcgccattttcatcttgatacttttgaattatattacggattacaagtggttgctcatcgatttctttaagcatgaaatgaggatatgttcccttttcaatatcacttgcgtctaattccgctgtaaacggtgcacgttcaatcgtttcaccttgtaagtttttaattgtaatactttctttcgttacgattacgatttctttatccattaactcaatgaattgatctgtaacttgtaacatcgccatagcgtcgcttgccacaacattaaagttgtcaccaacacctactaatagcgggcttttgtttttagcaacataaatcatgtttggattttcagcatcaagtaatccgattgcataagagccatgtaaaagagatagcgtattacggaacgcttcttctacacttaatcctgtgctcacttgttgttccataagctgtacgataacctctgtatctgtttcacttacgaacgttacatcttgtaaatattcctttttcactaattcatagttttcaattacaccgttatgaactaatgtaaagcgttttgatgtactttgatgcggatgcgcgtttactttacttggaacaccgtgtgtagcccagcgtgtgtgtccgatacctacgcttgctgctacgttctcatctacgatttcacgaagttttgcgatacggcctttttctttgtatacaacaacaccgttctctgcttgtactgcaatacctgctgaatcatatccacgatattctagcttttctaaaccttttaataaaatttcctttgcatcttgctctccaataaatcctacgattccacacatgtttagtcgccgttacaaatgcttacactgctctgcgaacatgtaacgacatagtccgataccatttttatttatactaaaaaacggattacatattgctagccctgtaagcttgtaacggctttcaccttcctctcgattgggtttaagtccgtatatacttatacagctagttttcatccgttcctcttctctcatcacactttcacctttgtccactaagtcaccttaatgatttaagtaaaagcttgcggttgtgatgaacaaccgggagtcatccgccgaaatctcgataaaccccacctcgtcaactacactatttgtagttctggcgcttttatgatttacaatatttcctttgagaaaaagaacaagaccatcttataacaaacatggataaaccgtcaatgaaatttttttcatcgtctataaaacatatgaaaaaggagcactttttgtgctcctttttcatataaattcagctaattattcagcgccaacttcggctttcacaacttctacaatgcgatgtacatatgcatcacaaacttcttgtgttggtgcttctgccattacacgaataagtggctctgttccagatgggcgaacaagaatacggccatcaccgttcatttcttcctctacaacacgaataatttctttaattttttcattttctaatgctaattttttatctgttacacgaacgtttactagcaattgtgggaatttcgtcatttcccctgcaagttcagataatggctttttcgtcattttcatgatgtttacaagttgaagtgcacttaacattccatcaccagttgtaatgtaatcaagtaagataatatggcctgattgttctccacctaggttgtaacctccgcgcttcatttcttccattacgtagcggtcaccaactgctgttttatcacttgtaatattatttgcttcaagtgctttgtagaaacctaagttactcataacagttgaaacaactgtattatgttttaattgaccagtttctttcatgtacttcgcacaaatgaacataatttgatcaccgtcaacgatgtttcctttttcgtctacagcaattaaacggtcgccatcgccatcaaaagcaagtccgatatccgcacctttttcttttaccaattcagctaagccttctggatgtgtagatcctacaccctcattaatattcataccatttggagaagttcccatcgttgaaatatcagcttctaggtctgcaaataagtatggagcaagagaagaagttgcaccatgtgcacaatctaaagcgatatgtaggccagagaaatcttcttcaacagtttgtttaatgtactgtaaatatttttgtccaccttcaaagtaatcactcacttgtccaagattagtacctgtcggacgtggtagttcatcaacttctttgtctaataaagcttcaatctcagcttcttgctcatctgttaatttaaagccgtctgaaccaaagaatttaataccgttatcttgtactggattatgagatgcagaaatcataacacccgcttgtgcgtctagtgcttttgttaaataagcaacgcccggtgtagaaataacgccaaggcgcattacttctgctccagttgataatagccctgctactaaagctccttctaacatatggccagatacacgtgtatcacgaccaataattacttttggacgatctgtatcttttgttaatacataaccaccaaaacgtccaattttgaaagctaattcaggtgttaactccttatttgcaactccgcgtactccatctgtaccaaaatatttacccattatgattcgctcctttttcttgctctttttgattgtgattatctactgttggttcttgactcgtttctttatctttatcttgattttgattttggttttgattcttttcctgttctttttctgaatcaggttcaggattttttggtttctcattttgattttcttgatcggtgtttgaatccggttgttgaccgttaccctgtacttctttatctggtttttctttcttcacaatagtaactttagcacttttttgttttggctctattgaaatattaccaggaccactcacttgaattgaaatatctttcgttcctggagatacattttgcagattaattaccgctgttatttgagcagctgttattttatctactatacttgcttctcctgaaatatcaacacttatctttccatcttgcggcgaaagtagctgagcagtaacatctttagaaagtccatttttctggattgggataccatcaatcgtttttgttttcgtttgttttgttttttgcactcccaccgaaaccttcacttgattcggtttggcacttgttacacccttgggtaataaaacagaggcatcgaatgttgtagactctgtcaattgactaagatctacttcgaccccctctagcgattgtatattatccaaaatatcttttggaccagctatcgttacttctctcggttcaacactgatatttgtaaccgccaatccttctgctaaactccccttcttcgtatacgttacaggaacagttttttcagtattattggctgtattttgcgttgccacattcaacgttacactaatcttagatggacttgttcttacatttaaacgttttccttctttattgtataatgtaacttcgggcgtttttgtaacagttttattaacaccttttaaatcaacatacgctttggcagatgaaatgctttcaatttcttctttcgtcccaactacctcaacagtatccggtttaaggcttgatttttctagagtagcccccgctggcatctgatcctcatttgataatttcagatctacatgaacatattttctcgccttttcatgaagagtaactttaattgttgatggctgaactgttcctttcacatcatctggaagcccgttcgtttttaaagaaatctcataagttccttttggactatctcgcaaatcaactggtatgtcaaattgtttttttgcttttgctgtagcaactgatgcttttgggccttctaattttactttaacgccctctgccggaataccacttacaatatatttctcctcatcatacttaagattaatagcataattagttaatgtttctttcgtatcatttgcaaaaggtaatataactgatgtcgtatttttttcagttaacgtcgctgacataaaaagcatacacgccaatagtaatgagatcccttttaaaaaccaatgattctccattaacttatccatgacgctttctcctccaattccataaagacgaagaagtcgttttttcgtttccactaaattcagctaataacatatccttcagctgttctgtcttcaaatcacgatgcaacttaccatttttcgttaaagaaatttgaccagtttcttcagacacaactactgtaatactatcagtaacttcactaactcccattgcagcacgatgtctagttcctaattctttagaaataaacggactttctgataatggaagatagcatgctgctgctttaattgtacttccttgcataattaccgctccatcatgaagaggtgtatttggaataaaaatattaataagtaattccgatgatacgtttgcattcagcggaatacccgtttccacataatcacccataccggtctcttttgacaaagtaattaatgcaccaattctacgtttccccatatattcggttgcttttgctatcgctgttgcaaccatttcaggttcatcatcctcatgcgttccaacacgcgaaaataaacttccgcgccctagctgctcaagtgctcttcgcaattctggctgaaagataataataacggctaaaaatccccacgttaatacttgttcagttagccaagatagcgtacgcaattcaaggaaaatactgatcatcttaacgacgataataactgtaatcccttttaaaagttgaacagcttttgtccctcggattataagaattagcttatatataataaaccatacaatggcaatatctaatgccgtactaagatatttcaaaatggtcgtatcttcaaaaggcatgctatcccttcctcctacttacgagcaattctatccatatattgaaatattgttttatgctctatctgtatgtatttccaacaactagttaattataccatacatgaaacaaacgacaattacaaacaaccccctttagctcaaattggtaagatgtcaaacatttttattgtacagtataatataaatcattattatacgcctattttcaaataaaaaaagcaacttctcagttgcttttcttacatttattttagtttttcaccgaataaagaacccattaaagcaactgctgttgttgccgttctatttctctcatctaaaatcgtatttacctcaacaaattcagcagatgtgataatatcagcttctgctaacatttccatcgccaaatgactttcacgataagatagaccgccaattacaggcgttccaacacctggtgcatcatgaggatcaagaccgtctaaatctaatgataagtgtacaccatcagtatgagataaatatgcgattgtttcttccataacagccgtcatccccatacgatcaatttcatgcattgagaacactttaataccttcattgcgaatgaaatctttttctccttcatccaatgcacgcgcaccgataattacgacattctcttttttcacctttggatatgctccgtataaatctacaagtgaagaatgtccataacctaaacttgctgcaagtgacataccatgaatatttccagatggtgaagtttcctctgtatttaaatcaccgtgtgcatcataccaaataacgcctaagtttttataatgttttgctacaccagctaatgtaccgatagcaatactatggtcaccacctaatacaagtggaaaacgaccttcttctataatatgatccaccttacttgctaattcattacatacagttgcaacttgtgtaaggtttcttaattttgtattttcatctatctctttttctctctctatacatatatctcccatatctttaacgtcatatccaatttcttcaattctttcaattacccctgcataacggatcgcgctcggtcccatatcaactccacgacgcatctgtcctaaatccattggaactccaataactgagatttcctttttcatagatagtatcccccttttatgccttcactaaatattttaaatcttttatatagtctgactcaactcgacatttttctgtatggatatacaatttattcacttatattcatactgaaaaccaaatttcaagactattctatgtataaagttaacttaatgaaacaatcgcaatcactattattaaataataataataaaacactcctacatttagaagtgtttttctgatgctattttccatactattgcaatattttttgttgtcatttcaatattttcttctgctactttatatgcttcttctagtgtcatcggtctcgttgtaatactaaataccgcatctattcctttctcgtacacagctgaataatcagatgatacagaccctccaatagcaattacaggcacagaaaaacgttttgcacgccccgcaacacccacaggagcctttccatatgcagtttgtttatctattctaccttcaccagttataatgagatttgcatcttctatatgtttatcgaaatttgtataatctaatacaatttcaatgcccctccgcaagtctccctttaacactgaaataacagccgctcccattcctcccgctgcccctgcaccaggtatttcagatacatcaaaagatacatatcgtttaagcatattcgcataatgttgtaaattctcatctagctctttcatcatctctacatttgcacccttttgtctcccaaatatgaaagatgctccctgcattccgactaatggattatccacatcacatgccgcttctatctttaccccctttaagcgggggtccatttgtgaaaaatcaatagcaacaatcgaatgtaatgtgcctccagatggatctattacttcacccttgtcatttataaatcttactcctaaagctgctaacatacctgccccaccatcatttgtagcacttccgccaagtcctaaaattatgtactccactccttgatctagcgcatgtaatataagttctcctgttccttttgtcgttgtaataagtgggttgcgcttttcaactggaacgtgctgtaatcctgatgctgctgccatttctataaacgctgtctttttatctttagaaatgccataaaaagcttgtataccttctctaagcggtcctgtcacactaattgatataattctcccccctgtagcatcaacaagtgattcaaccgtcccttctcctccatctccaattggtattttcacatactctgcattaggaaaaattgctctaaaacctctttcaatagctccacatacttctatagcttttaggctttctttatatgaatcagatgcaataacaactttcacaattatctccccatcccttatttttacgttttcttcattttaaacgacaagtataaaagttgtctttttaaacacaaaaaaagcttacatcatatgatgtaagcttttttatttagatggagcctagcgggatcgaaccgctgacctcctgcgtgcaaggcaggcgctctcccagctgagctaaggccccttattaattaagcggaagacgggattcgaacccgcgaccccaaccttggcaaggttgtattctaccactgaactacttccgcaaaaatgatgagccatgaaggactcgaaccttcgaccctctgattaaaagtcagatgctctacttagtttgtctagcatctaaaataaaaattgacgtttcacgttgtttgtttcgtttagttttcaaagttcaatatcgcgtttcagcgacttttataatatatcatagtatattattttcgtcaacaagttttttcgataagttgtatctctcatttgctgactctgcctattatataggctttctcttccctatgcaagtattattataaaaaaataaagagagggaaaatcccctctcttattcttctgaagaaacctcttcactcgtttcttcctcttcatctttttgtgcttttgctaccgtcgctacctcttggtcttcctctaatcgaattagacgaacaccttgtgtattacgtcccatttgagagatttgatcaactggcatacgaataataacgcctgccgctgtaattaacataatatcttcttcacctgtaacagatttaacagctactaatttaccgttcttatctgtaatgttacaagttttcagacctttaccaccgcggctttgcagacggtattcatcaatcggtgtacgctttccgtaaccatttttcgttacaattagaacatttacatcctcttcgacaatttccatacctacaacttggtcttcatcgcccaacgtaatagctttaacacctgcagcattacgtcccatagaacgaacatcttgttcattgaaacgaattagcataccgttacttgtcccgacaataatatccttatcacccgatgttaaacgtacagatattacctcatcctcttcacgaagagaaattgcaattaaaccatttgtacgtatatttgcaaatgatgaaagtggcgttctcttagaaaccccttgttttgtcgtaaagaataagaactgatcgtcaccaaattcacgaatcggaataatagcgttaatccactcacccttatctacccctaataggttaataattggtagtccttttgcagtacgactatactctggaatttcatatcctttcgtacggtatactttacccttgtttgtaaagaataaaatatgatcatgagtagacgttgttaataaatgttcaacaaagtcatcatcattcgtacccattccttgcacaccacgtcccccacggttctgtgttttgtacgtagaagctggtaacctcttaatataaccgttatgagttaacgtaatcgcaatgttttgttcaggaattaaatcttcatcttcaataaattccataccgccaattgtaatttctgttcgtctcttatcattgaaacgctcttttacttctgttaattcttcacgaataatctcaagaactttttcttcatctgctaaaatcgcttttaattcagcaattaacttcattaagtcttgatattcttgctcaattttttcacgttctaatccagttaagcgttgcagacgcatatctaaaatcgcttgcgcttgtttctcacttaaaccaaaacgttccattaagccttgcttggcaatatctgccgtttttgaactacgaattaacgtaataacttcatcaagatgatctaaagcaattcgtaatccttctaaaatatgagcacgtgcttctgctttttctaattcataagcagtacgtctacgaattactaccttctgatgctctaaataatgatatagattttgttttaaatttagtacttgtggctccccatttacaagagacaacatattaataccgaaacttgtttgaagcgctgtatgtttatatagattgtttaatagtacgtttgcattagcatcacgacgtacttccatgacaatacgcataccattacgatctgattcatcacgtaaatctgtaataccttcaattttcttatcgcgaactaattctgcgattttttcaattaatcgtgccttattaacttgataaggtagttcagttacgataatagattgtttaccgtttgacttctcttcaatttcaaccttagcacgaagcataatggaaccgcgacctgtttcataagctcttcgaattccacttcttcctaaaattaaacctgccgtcggaaagtctggaccgggaatatattccattaattccgcgatagtaatatcaggattatgacttaatgccagcacaccatcaattacttcgccaagctgatgcggcggtatatttgttgccataccaacagcaatacctgttgtaccgtttactaataaattagggaaacgcgctggtagtactatcggttctctttcggaaccatcatagttatcttgataatcaattgtattttttgaaatatcacgtattaattccatagaaatcttagacattcttgcctctgtataacgcattgcagctgctgaatctccatctacagaaccgaagttaccatgcccatctacaagcatataacgttgactaaaatcttgcgccatacgtaccattgtttcataaacggctgaatcaccatgagggtgatacttaccgattacttcaccgacaatacgtgctgatttcttatacgctttatcagctgtaattcctaaatcattcatcgcatataaaaccctacgatgcacaggttttaatccatcacgaacatctggtaatgcacgagatacgataacactcattgcgtaatctaaaaatgaggtacgcatttcatgactaatattaatttctcgaattcgtgcttgttgttgattgtctgacatcaacgagcacctcctcttacatttccgttacacatacattgatttatatgtagaagacaggaatacttagattcctgtcattactcatttaaatatcaaggttcttcacgtattttgcattctcttggataaagttacgacgtggctctactttatctcccattaaaatttcaaatgtttcgtctgcttcaattgcatcttgaagggaaacttgaagtaatgaacgtacttctggatccattgtcgtctcccatagctgagttggattcatttcccctagacctttataacgctgaatccctggcttaggttgggccggtaattctgctaagattttttcaagttccttatcgttgtaagcatattgaatttttttaccttgttgtattttaaacaacggcggctgtgcaatatagatataaccacactcaattatttgacgcatataacgatagaagaacgttaataatagggtacgaatatgtgcaccatcaacatcggcatcggtcataataataaccttatgatagcgtgctttttcaatatcgaagtctccaccaatatttgtaccaatcgccgtaataattgtacgaacttcatcatttgataaaatcttatctaagcgtgccttttccacattaataattttacccttcagcggtaaaattgcttggaaatgacgatcgcgtccttgttttgcagatccacccgcagagtcaccctctacgatgtaaatttcactaattgctggatctttcgaagagcaatcagctaatttaccaggtaaacttgaaacttctaacgcactctttcgacgtgtcaattcacgcgcttttttcgcagctacacgtgcacgtgcagccatcgtacctttttctacaatttttcgcgctacattaggattttctagtaagaacttttcaaacgcctctgagaatacagactctgtaattgttctcgcttcactattcccaagttttgtcttcgtttgtccttcaaattgtggatttggatgcttgattgatacaattgctgttaaaccttcacgaacatcctcaccagttaaattactgtccgcatcttttaaaatgctatttttacgaccatagtcgttgattacacgagttaaagctgttttaaaacctacctcatgtgtaccaccttcatacgtatggatgttattcgtaaatgagtaaatattatttgtgtatccctcgttatattgaagagaaacctcaacctgaataccatcttttgaaccttctacgtacacaggctcttcatgaatcggttgttttgagcgatttaaatgctcaacgtatgatttaattccaccttcgtaatggaattctttcttttgcttatgttcacgtttatcttcaattgttaatttaatattacgatttaaaaacgctaattcacgcatacgagttgctagcgtatcaaaatcgtatactgttgtttcttggaaaatttccggatctggtttaaatcgagttattgttcctgtttgatctgtgtcaccaatgacttttaaatccgcaaccggaatacctctttcgtatttttggtaatggattttaccttcacgatgtacaaatacttctaattctgttgatagagcatttacaaccgatgccccaacaccatgtaaaccaccagaaactttataaccgccaccgccaaatttaccaccggcatggagaacagtcataataacttctacagctggacgtcccattttttcttgtataccaaccggaataccacgcccattatccgttacacgaatactattatcttcttcgatactaacattaatttcatcacaataacctgcaagtgcttcatcaatactattatctacgatttcccacacaagatggtgaagcccttttccacttgtagatccaatatacataccagggcgtttccgaactgcctctagtccttcaagcacctgtatctgactttcatcatatgcattttcttgcatttgcttttgttccattgacacaaagatcacctacttttccatttaaacaggggttattccctatctatttcacaatctacagtgccgttcgttacatgaattgttttcgcttcttttaatgtttcgtgttcaattccgtcgacactcgtcgttgtaacaaatgtttgcacttttccttgaattgtatttaaaagatgtgattgacgataatcatctaattctgataaaacatcatccaacaaaaggattggatattctttaacctctgaataaatcaattcaatttcagctaattttagggatagtgcggtcgttcgttgttgtccttgcgaaccaaagacttgaacatttttactattaacgaagaattgtaaatcgtcacgatgaggaccaattaaagtcgtaccacggaaaatttcacgttgtttcacagattgaaaactttcatagtatacttcttttattttcgacaaatccattgattctgatacatctacacttggtttatagacaatttctaactcttctaatccacggcttatacctcgatgaattggagctgcccattcctgtagcaaatgcaaaaattcaaaacgtttttgcagtattttcgcaccatgctcaattagttgaagtgtaaatacatccaacatcgtttcctcattcttactattcccttgcatttttttcaacaagtgatttcgttgcgtgagcaccttttgatattgacttaattcatacaaatatacaggagctatttgtcctaattccatatctaaaaagcgtcttcttacttgagggcttccttttacaagatttaaatcttctggggcaaacatgacaacgttcatcacgccaatatattgacttaacttttgttgttcaagttgatttaattttgcctttttaccttttttcgaaatatttaattccaaagacaaagaactgtttcttttttgtaatttcccctttatttgaccaaaatcttcatcccagcggataagttcgcgatcattagaggttctatgagatttcgccatcgctaaaacataaatagcttccatcaaatttgttttcccttgtgcattttcgccgataattacatttaccttatcttcaaaggaaagctctaatttttcataattgcgatagttttttaattgtatttctgaaataaacaaagggctccccctttatgcctgaacttggaaagttccgcttcctggaatttcaataacatcattcgcatatagtttgcgacctcttctattttcaagttcgttgttcacgtacacttcatattcttgtaaaaaccattttacagcgccacctgtatcaattacatcagctaactttaaaaattgtcctagtgtaatatactctgttgaaattttaatacgtttcataaaatcgctcactttctgaaagtgttcattctttcattgtactaaataaactagcattaggaaagtaatacccaaaaatcaaataagggccactagcatctttaaactagcaacccttattccttacctagtaagtacgaaccggtaaaattaattgaataattgaatcatcatttactgtacgaattaagaacggtctcattgccccagtaaagctaactttaatctctgtactatccaaagcttttaatgcatccatcatatattttgcactaaaagatatttttaactcttctccatctactttttcgcattgtacttcttcgacaacttttccgatttctggtgaattcgaagaaatctctagcatttcttgctctaaagttgataatttaacaacgttattgcggccatctcttgctaatagtgaagcacgatcaattgcttgtaggaattcttttgtatttacaaaaatatccgttttactctctgctggaattaaacgtgtcgtatcaggataatttccttctaacaatcttgagaagaataataaatgttttgtacggaataatacttgatactccgtaataacgatatctaccatttcttcagactcatctaaaattttacttaattcatttaagctcttacctggaataacaacattagcttggaattcatctgcaatgttatgtccttcaatttttgcttttcgaagtgccagtctatgactatctgttgcaatacaagttaactcgctgttatataccttccagtttacacctgtcaagatcggtcttgtttcagaagtagaaactgcaaatacagtttgtctgatcatatgcttaagtaaatctgttggtatcttaaatacatgatgttcttcaatctgtggcaataacggatattctgcagaatctaaaccatttaagttaaactctgattttccagattttatttttgtcataaaatgattttctacagaaatttcgacagtgtctttaggtagtttttttacaatctcactaaaatattttgcctgtaaaacaatgcttcctgattgagcaatttctacgatttcttttccatcttcttcgactggaataaacgattcaatagaaatatcagcatcgcttcctgttaatgtaaccccttcttcagtagctacaactttaattcccgtaaggatggggattgttgtacgagaagaaactgccttcattacatcttgtacacctcttacaagatagtctttttgtattgtaaaacgcataaagaaaaacctccggtaagtataagattttatttaattaataaagataaaaaaatagtagtaatagtaatagggcttgtggatatgtggataacccctataaaggatgtaaaaacagtctatctacatgtggatagactgtgcgtaaaacaaggtaagttattcacactattcagctactactttaaaataccattaatttcttcaacttgcttttgtaattgcgtatcggtttttagtagtttagagattttttcatgggcatggataactgttgtatgatcacgtccaccaaattcttcacctatttttggtaaagaggaatctgtaagctcgcgcgataaatacattgcaatttggcgaggaaacgcaactgatttggtacgttttttcgctttaaaatcttctaatttcacttgataaacatccccgacagctttttggatatcataaatagagataatttttggcttagaatttggaataatatctttaagtgcttcagctgctaaatcagcattaatatctttattaattaaagatgaataagctacaactcggataagtgcaccttctaattcacgaatatttgaatcaatttgatttgcgatataaagcataacttcatttggtatatcaagcccttcagcttttgcttttttgcgtaaaatcgcaattcgtgtctctaaatctggcggcgtaatatctgtaataagcccccattcaaagcgggaacgaagacgatcttctaaagtcggaatttcttttggtggtcgatcactagaaattacaatttgtttactttcttcgtgtaatgcattaaatgtatggaaaaactcttcttgagtttgttcttttccagcaagaaattgaatatcatctatcaataaaacatctacgttgcgatatttattacgaaaatcaacagccttattatcacgaatagagttaataaattcatttgtaaatttttctgatgataaatatacaacttttgcatttggattatgttcaattacataatgaccaattgcgtgcattaaatgcgtctttccaagcccaactcccccgtaaataaagagtgggttatacgctttagctggcgcctcggctacagctaatgaagctgcatgggcaaaacggttaccagagccgataacaaatgtatcaaatgtatattttggatttaacatgctctgtggtaaatgagctgaatcatcttgtgctggattcggcttaactggaggcagatcaatatcctcttcagcttgactttgaggaataataaagcgaattgctaattttgcccctgttaaatcgtatagtgtttctgaaattagttcggagtaatgagattctagccagtcacgagcaaattcatttggagctgtaatcgttaatacgtctttcttcaagttatgagccgttgttgattttaaccatgtctcataactaggcttgcttacctttttttctaattcttttaaggcactattccataaatcagagatattttccaaaggtgtccctcctttactaagatggtaaaagaataaggttgcgcaacaaatgtacaacccaataaatataaaatgtatatttatacgaaacgtattttaaaacctaaaaacgtcgtttgtatatgagatagggttttcgacaaaaaaagcaaatgtggacaactatttacccacatgtgattaaaactgtccacatgttatacacaaactgtggataaaataaaggtgtggaaaacttattcaaagtgaaaacacaactataatatcaaaaaaaagtggctatagcaatgaatttaagaaagttatccacaaaatcaataccttgtggaataaacttgtccacaacacgatatactgtgtaaaagtgcgaaaaaagtttgtggatataaaaaacgtgaaaaaacatttatccacaaggaaatataggtgctgtgtaaaagtatgtgaataggttcaaaatgaatatttgatgaaaatttctagaaccattgacattttcctagttgattaactataatttataggactgtctttaacagatattcctcagggaggtgtcatataatgaaaagaacttaccaaccaaataaacgtaagcgcagcaaagtacatggtttccgcagccgtatgagcacagcgaacggacgtaaagtgctagcagctcgtcgtcgtaaaggaagaaaagtattatctgcgtagaccactgatcgttcagtggtctttttttctaataatagtgaatttccgctgatgaaatacaggagtgtcaattgatatgaagaaaaaacatcgtataaagaagaatgatgaattccaggcggtttttcaaaaaggaaaatcaaatgcgaatcgtcagtttgttgtataccaattagataaagaagaacagccaaactttcgcatcggcctttctgttagcaagaaaattggaaatgcagtagttcgtaatcgaattaagcgcatggtccgtcaggctattacagagttaaaagatgagatagattctgggaaagattttgttataatagcaaggaagccttgtgcagagatgacatatgaagaagtaaagaaaagcttaattcatgtctttaaacgctctggtatgaaaagaataaaaaagtagcgtaaggaaatgaattacactatatacataccgatacaaggaggagtaggctttgaaaaagaaattaggtttactagccatggtcgttgcattaatggcgattgccaccggttgtagtgaaacgggtcagccgattacatcgaaaagtactgggatttggaatgaatatttcgtatatccgctttctcagttaatcacgtattttgccgacttatttaacagtaattacggtttagcaattgttattacaactcttatcattcgttttgcattattaccactaatgattaaacaaacgaagagtacgaaagcgatgcaagcgttacaaccggaaatggtgaagttaaaagagaaatatagctctaaagatcaagcgacacagcaaaaactgcagcaagaaatgatgcagttatatcaaaaaaatggtgtaaatccattagctggttgtttaccaatctttattcaaatgccaattctgttcgctttttatcatgcaattatgagaacagctgaaattaaacaacatagtttcttatggttcgatttaggacatgcagacccgttctatatcttaccggtcgttgcagcaattacgacatttattcagcaaaagcttgcaatggcaggaacagctggtcaaaatccgcaaatggcaatgatgctttggcttatgccgattatgattttaatctttgcaattaacttcccagccgcattatcactttactgggttgttggtaatatctttggtattgctcaaatgtactttatcaaagggccagaaattaaggctagcaaagctggaggctcaagcaagtgagtataattactgctaaaggacaaacagtcgagctggcagtagaggatgctttaaggcaattaaatacatcaaaagatcgagtagatataaatattgtcgatgagggtaaaagaggattcttaggtttatttgggaatcgtcctgcagtagtagaagttgtattgaagaaagatccaattcaagaatgtgaagaatatttaagaaatgttattcacgatatgggtgtggaagttgagattagtaaaattgtaaaaggacgcgaaattgaatttacaatttctggtgataatgtaggtgttttaattgggaaaagaggtaatacattgaactctttacagtatttaacaaaacttgtcgcgaatcgtaacacgaagcagtatatcggtattacactagatgctgaaaattatcgtagtaaaagaaaaagtacgttagaatcactttcttatcgattagcgaaacaagtatttaatacgaaaaaaagagttattttagaaccgatgccatcttttgaacgaaaaattattcatcaggcattatcaaatcatcaaggtatcaatacaacttctgaaggaaatgaaccacatcggcatgttgtaatatctcctaaatgaccggttgctcaaatgagtgccggtttttttgagcggaaaatagatgtggataactaaaaaacactaaacttatccactgtgaataagtttagtgttttttacatggggatataataaaatgagttattcttcttttgtagataggttcgttatggtatcctaataatttagtgaaagaaataatcatgttgaaatagagataaataagcaagtgaggtgaaaggacatggaatttgatacaattgctgcgatttccacagcgcttggagagggtgcaattgccattgttcgagtaagtggggatgatgcggttgagaaagttaatcgtatttttaaggggaaggatttaacagaggttccttctcacactattcattatggtcatattgttgatttagatacaaatcaagttattgaagaagttatggtgtctattatgcgcgcaccaaggacttttacacgtgaaaatatagtggaaattaactgtcacggtggacttgtttcagtaaataaagtattgcaacttattctagcacaaggagtacgattggcagaaccgggcgaatttacaaaacgtgcttttttaaatggacgtatcgatttatcacaagcagaagctgttatggatttgattcgagcaaaaacagatcgtgcgatgaatgtagcaattaatcaaatggaagggcgattatctaaattaattggtcttttgcgtcaagaaatattagaaacattagctcatgttgaggtaaatatagattatccagaatacgatgatgtagaagagatgacacataatattttaattgagaaagcgacgcatgttcgttcggaaatcgaaaaaatattagaaacatcaaaacaagggaaaattttacgtgagggtattgctacagcaattatcggtagacccaacgttgggaaatcatcgttattaaatagtcttgttcaggagaaaaaggcaattgtaactgatattgcaggaacaactcgtgatgttattgaagagtacgttaacgtgcgtggtgtacctcttaaacttatagatacagccggtattcgggagacagaagatgttgttgaacgaattggtgtggaacgttcaaaagaaatgatgagccaagcggatttagtattagttgttgtcaactatagcgaggctttaacaaatgaggatgaagatctattccgtgcggtacaaggaaaagactttattgttattgtgaataagactgatttaccgcaagcgattgatatggaacgtgttacagagttagccgcgggaaatcgtgttattacaacatccttaattgaggaacaaggaatagatgaactcgaaaaggcaatagctgatttattctttgaaggaacaatcgattctgcagatatgacatatgtttctaatgcgagacatattggattattaacacaagcaggaaaaacaatcggtgatgcagttgaggcgattgaaaatggtgtaccaattgatatggtacaaattgatttaacaagaacgtgggaaatacttggtgaaattactggggacacagtgcatgaaagcttaattgaccagttgttctctcaattttgtttaggaaaataatatagtgaagttgtagaaagatagagattattaggaggaataaacaatgggatacaatgccggttcatacgatgtcatagtaatcggtgcaggtcatgcaggatgtgaagctggtcttgcggcagcacgaatgggctcaaaaacattaatgttaacaattaacttggatatggtagcattcatgccatgtaacccttctgttggtggaccagcaaaagggattgttgttcgtgaaattgatgcattaggcggagaaatgggacgtaatattgataaaactcatattcaaatgcgtatgctaaatacaggtaagggaccagccgtacgtgcacttcgagcgcaagctgataaattctcttaccaacatgaattaaagaaaacaattgaagaaacaccaaacttaacgttgttccaaggaatggtagagcgtttaatcgttgaagaaggtgtatgtaaaggggtagttacacaagctggtgcagaatatacagcaaaaacagttgtaattacaactggaacatttttacgcggcgagattatcatgggcgacttaaaatattcaagtggtccaaataatcagcaaccgtctattacattatctgagcatttagaggagcttggatttgatcttgtgaggtttaaaacagggacacctcctcgtgtaaacagtaatacaattgactacagtaaaacagaaattcaaccaggtgatgataagccacgtgcattctcttttgaaacaacgaaatttattatggatcaaattccatgttggttgacatatacaagtacagaaacacaccgtttaatagatgaaaatttacatcgttcagctatgtattctggtatgattaaaggaacaggtcctagatactgtccttctattgaagacaaagtagtaagatttaatgataaaccacgtcatcaaattttcttagagccagaagggcgtaatacacaagaagtatatgtacaaggtttatccacaagcttaccagaagatgtacaacgtgacatgcttagaacaattccaggcctagaaaatgttgaaatgatgcgtacaggttatgcaattgaatatgatgcaattgtgccaacacaactatggccaacacttgaaacgaaaaagattaaaaatttatatacagcaggacaaattaatggaacttctggttacgaagaggcggccggacaagggcttatggctggaattaatgcagcatgccgttctttaggtaaagaagaagttgttttaggtcgcgaggatgcttatattggcgtcttaattgatgatcttgtaacgaaaggtacaaatgaaccatatcgtttattaacgtctcgtgcagaataccgtctattattacgccacgataatgctgatcttcgtttaactgaagttggtcgtaaaattggattaattaaagaagagcgctatgagcgatttacaaataaaaaattacaaattgaacaggaaaaggaacgtttaagcagcattattattaaaccacgtcctgaagttcaagaattaattcgcaatattggcggaagtgaattgaaagatggaatacgtgcaagtgacttattacgtcgtccagagatgacatatgagcatattcatcttttagtaccaagtgaagtagaattaagtgatgaagttaaagaacaagttgaaattcagattaagtatgaaggatatattgaaaaatctttacagcaagtagagcgtatgaagaaaatggagaataaaaaaatccctgtagatattgattatgatgcgatttctagcattgcttcagaagctagacagaaattgaaagatgttcgtccactttcaatggggcaggcttcacgtatttctggcgtaaatccagcggatatttccattttacttgtgtatatagaacaaggaaaaattgcacgcgtatcgaaccaataaatagtaaggagatattgctagatgaacatagaacaatttcaatctatgctagaagagaagggaatcaccctctcttctagacagttagagcagttcaaaatctactttgaaacattagtagagtggaatgaaaaaatgaacttaacggctattacagaaaaagaagaagtatatttaaaacacttttttgattccattacagctgctttttattatgatttttcaaaaccattctcaatttgcgatgttggtgcaggggctggattcccaagtattcctttaaaaatttgtttcccgcatttaaaagtaacaattgtagattcgttgcaaaaacgtattaatttcttaaatcacttagcacaaaagttagaattaagtgatgttgcattttgtcacgatcgtgctgaaacgtttgggaaaaaagaaggtgtacgtgaatcatacgatattgtaatggcacgtgcagttgcgcgtctttctgtattaagtgagctatgtttaccgcttgtaaaagttggaggaacattcattgcaatgaaaggtgcagcagcaaacgaagaaattgaaaatggcaagtatgctttagaggtgctaggcggagagttaaaagagatgtctacgttccaattaccgtttgaagagagtgaacgtaatattttattaatcgagaaaaagcgcaagacaccaaagaaatatccacgcaaaccgggaacacccaataaattacctattgaaaaataaatcttattagacgtaagattaaattatataaatgaaaacgtaaatgtttcataggaaacattttatggagaatagtcaataggcctaaaaggtggtggaatatgtatgaaaaatacgttttctcgtttatttggctttggagataaagagagcgaattcgaattacaagacgaaagccatgaagagatagataaaaaggtatatgaagaaatacaagaaattccgatagtaaatattacccctaaccgttatcaaccaagaacagtttttgatgatgcgcgtattgatgagctagcattaacaattcgtacacatggacttattcagccgattgttgtaaggcaatatgaggatgataagtacgagattattgctggagaaagacgttttcgcgcggcaacaaagttaggttgggaaaaggttcctgcaattataaagaacttaaatgatacagagacagcttctgtagctttaattgaaaacttgcaacgtgaggaactaacggcaatcgaggaagctgtggcatatcaaaagctgattgagttacataatttaacacaagaagcattggcacaacgacttggaaaaggacaatctacaatcgcaaataagttgcgattgttaaagttgcctgaagaaataaaaagtgcattattagaaaaaagcattacagaacgtcatgcccgcgctctcattcctttaaaaaatgaggaattacaactgaaagttttacaggaaattgtggagaaacaactaaatgtaaagcaaacagaagaacgaattgcgaagttactagaggaagcgaaaccgaagcgtaaggcaaagcaaaaagcagtaagtcgagatacgaggattgctatgaatacaattagacaatctttacaaatggttactgaaagtggtttgaatgttaattctgaggaagaagaatttgatgagtactatcaaattacaattaaaattccaaagaaaaaataataatgacgtgctagagaccttatcctattggagaggtctcttttactatattttcttgttaaatgaagaaggagtttagaaataaattttgaagtttaataaaggacgtaaaagaaaaagttttatttcatgttacaataaacgtaattgttactagaataagatagaaaggttgaaagtaggtgacatcatgggaaaaatcattgctattgctaatcaaaaaggcggtgttggaaaaacgacaacatctgttaatttaggggctggattggcgcaagtaggtaaaaaagtccttcttgtagatattgatgctcaaggaaatgcaacgactggtgtgggaattgaaaaatctgaattagatcaatgtatttacaacgttcttgtggaagatgcagatgttcaaggggttatacagaaaaccgcaactgaaaacttagatgttctacccgctacaattcaattggctggtgctgaaattgaattggtaccgactatttcccgggaagtacgtttgcaaagagcattacagccagttcgtgatgaatatgactatattattatcgactgtcccccatctttagggttattaacgattaatgcattaacagcagcagattctgttattattcctgtacagtgtgaatactacgcactagaagggttaagtcagctattaaatacagttcgacttgtacaaaaacatttaaataaaaatttagcaattcaaggtgtattgttaacaatgttggatgcccgtacaaatttagggatccaagttatagatgaagtgaaaaagtattttagggataaagtatatcgctcgattattccgcgtaatgtacgcttgagcgaggctccaagtcatgggaaacctattatgcagtatgacgctaaatcaagaggagcagaagtatatatagatttagcagaggaagtgattgcaggtggctaaaggattaggaagaggaattaatgtgttttttcctgatttagatgtgaaagaagaggaaacaattcaggagattcttgtaactgaattaaggccgaatccatatcaaccgcgtaaacactttaataaagaggcgattcaggaattagcaatttcgattaaggaacacggtattctacaaccattaattgctaggaagagcattaaaggatatgaaattgttgcaggtgaaagacgatttcgtgctgcaaaagaggctggtttagaaaaagtacctgcggttgtaagacaattaaatgaacagcaaatgatggaatttgctttgttagaaaacttacaacgagaagatttaaatcctatggaagaggcaatggcataccagatgttaatgaatgagctaaatgtaacgcaagaacaattagcgaaacgtcttggtaaaagcagaccttacattgcaaattatactaggttattaagcctaccttctttcgtacaagatatgattgcaaatggtcaactttcaatggctcatgggagaactttacttacgataaaagatgaagaacaattgaagtccttattgaaacgcattgaaaaagaaggattaaatgttcgtcaattagagaaaatcgtccaagagattaatcaacacgtttcacgtgaaacaaaaaaagtgaaaaaagagcgaaatatatttttcgtagaacgtgaaacgttcttaagagaaaagtttggcacagatgtgaaaattaaagagacgaaaaaagaaaaaggtaaaatcgaaattgaattttttaataaagaagatttaaatcgtattttagaactattagcacagaaaaattaaaaagcaaaccatcttattatttatagatggtttgctttttttaatgcggataatttttgatccgtctcttttatactttgtgcgattacatcagccattttcatgactaaacttaatcttgtattttgaagaacgaaaaactccataaacccatttagattgacgataccgtgtatgtgcaaatcaccaactgcaggtaatttcttattcatagcagctccaggtttactaggtccctttccagtagtgattgatccgatattttgggactttcctaaacatgcatcaacagcaattataaatgcagtaggatattctttctgtatattctgaattttctcttctaaatttagcgcatgtactggctcatctagtgtaccgaatacttggaggttttggatgtctatttgttcaagttttgtaccaactaatgggccgagtgcgtcacccgtagagcgatctgtgccgatacaaacgagaatgagtggtatattagttttaataggaatatgggtaagtaagaaattactgattatctcggaggcttctagatcttggtgcataacgttttgagtttctttctcaaaaaatggtaagcgaaaacttccaatattcatgaagcacccatccttttaataaattttcaatatgtgttatatggtgaggaaaatggaaagttataagtgcgtaatttttgcaaaatgtgaatgaaaacggaaataatagtactagtatatatatattcgttccattttatacctggatatcggggataaaataggattaaaatcataaaattttttcagcaattaggggacttctgatacaataataagggtaactaaaaagaaattttagctagagaggtagaggtacatggatttattaacgaagtggtttaattctatgaaacagtatttattagatgctgatcgttgggctcatattggagttgcgacattaaaaatatgcattattttaataattggtgcggttgttgtgcgaattgcaagagcggttgtacgaaatgcgtttcgcatgggaagtcgttctccaattcaaatttcagaacgtcgtacagttacagtagcgaaattacttgaaaatattgtagcgtacgttgttatgttcattatgctaattgcgattttaggtgtgtttgatattaatgcatcaggtttattagcgggtgctggggtaattggtttagcagtcggatttggtgctcaaagtttagtgaaagacgttattacaggtttatttattttgttagaagatcagttttcagttggcgattatgttaaaatcggtcaatttgaaggagtcgttttagaaattggacttcgtacaacgaaagtaaagagttggacaggtgaaattcatactttaccaaatggaagtattattcaagttactaactactcagttagtaatagtgtagcgtttgttgatgtatctatttcatatgaggctgatattgcgaaagcagagcaggttattgaagatttattagtagaattaccttcaaagtacgaaaaaatggtaacaacgcctcaattattaggtgtgcaaacattagctgcatcagaagttatattacgtgttattgctgaagtagaaccgatgcaacatgcagttattgcaagggcacttcgtaaagagattaaaaatcgtcttgatttacatgggattgaaattccatatccgcgtatggttttatataatcgtgaagaattagttagtggaaaagcaatttagtatggagaggagtttggagagtggagcaaaaggaatataacttgtatgatgttgtggaaatgaagaaagcccatccatgtggcgagaatcgttggaaaattattcgtatgggaatggatatccgcattaagtgcgaggggtgtgaccattcagtaatgattcctcgaagagagtttgatcgtaaggtaaaaaaaatacttgtgaagcacgaagaatagagggagagtaacagttacagtaggtaactgttactttttttcgtttggcggaaacttgtcatttttttcgttactatctataatgatgaaagattgagacataggagtgaaaaatatgggattaacggctgggattgttggattacctaacgtagggaagtccactttatttaatgcaattacacaagcaggagcagaatctgcgaactatccattctgtacaattgatccaaacgtagggattgtagaagtaccagatgagcgtttaaataaattaacggaactagtagaaccgaaaaagactgttccgactgtattcgagtttactgatattgcaggtatcgtaaaaggtgctagtaaaggtgaaggtttaggaaataaattcttatctcacattcgtcaagtagatgcaatttgtcaagttgttcgttgttttgaagacgaaaatattacgcacgtttcagggaaagtagatccaattgatgatattgaaacaatcaatttagagctaattttagcggacttagagtctgttgataagcgtatcgagcgtgttgcgaaattagcaagacaaaaagataaagaagcggtatatgagcatgaaattttagttcgtttaaaagaagcttttgaagagggaaaaccagctcgtactgttgaatttacagaagagcagatgaagattgttaaaggccttcatttacttacaacaaaagaaatgttatacgtagcgaatgtaagtgaagacgatgttatcgatccttcggaaaataaatacgtacaaatggtaaaagaatttgcagcaaatgaaaattctcaagttatcgttgtatgtgcaaaaatcgaatcagaaatcgctgaattagacgaagaagagaaaaaagtattccttgaagaattaggaattgaagagtctggtttagatcaattaattcgtgcagcatatgatctattaggacttgctacttactttacagctggcgttcaagaagtacgtgcttggacatttaaacaaggaatgaaggcaccgcaatgtgctggtgttattcatacagactttgagcgtggatttattcgtgcagaaacagtttcttacgatgacttaatgacaaacggttctatgacagctgcaaaagaagctggaaaagtacgtttagaaggaaaagaatatatcgtaaaagacggagatgttatgcacttccgttttaacgtttaatttaatatttcctaggaaaaataaagatatgagcttggcaaatatattatatgtttgccaagttttttatgtattggtgagttgattcatataacttactatgatataatctaaactcgtgagtaattactataaattaattgctccttgcccattacgggccgtttagaccaaaaggaggtgaaagtgtaatgagaaagtacgaaattatgtacatcattcgtcctggcgttgaagaagaagctcaaaaagctttagttgaacgttttgcaggtgttttaacaaacaatggtgcagaaatcattaacacgaaagagtggggtaagcgtcgtttagcttacgaaatcaacgacttacgtgaaggtttctacatgatcttaaacgtgaaatctaacgcagaagcgattaacgaattcgaccgtttagctaagatcaacgaagacatccttcgtcatatcgttgttaaagaagaagaaaaataattgatatataagggagagtggttcgattgatgaatcgtgttatcctcgttggtcgtttaactaaggaccctgacttacgttacacgcccaatggtgttgcagtagctacttttacgttagctgtgaatcgcgcatttgccaatcaacaaggtgagcgtgaagctgactttattaattgtgtaatatggcgtaaacaagcagaaaacgtagcaaattatttgaaaaaaggtagcttagcaggcgtagatggacgtcttcaaactcgtaattacgagggacaagatggtaaacgtgtatacgtaacagaagttcttgcggaaagcgtgcaatttttagagccgcgtaatggcggtggggagcaacgtggttcatttaatcagcaaccatcaggagctggtttcggtaaccaaggctctaacccatttggtcaatctagtaattcaggtaaccaaggtaactctggatttacgaagaatgacgatccattttcaaatgtaggtcaaccgatcgacatttccgacgacgatttaccgttctaatacagtaaatttgttagttttaacaaagaatggagggaaatagacatggcaggacgcaaaggtggacgtgcgaaacgtcgtaaggtgtgtttcttcacagctaacggcatcactcgcattgactataaagatgttgatttattaaaacgtttcgtttctgagcgtggtaaaattttacctcgtcgtgtaacaggaacaagcgcgaaataccaacgcaaacttacagttgcaattaaacgtgctcgtcaaatggcacttttaccatatgttggtgaataatagcgtatgaaatgcacagtagagtcggactctactgtgcattttgctatgcttttcttttttgaaagagaggttaaaatgtgaaacaagcaagatttattactgaaggtgccgcgttgttggctatatatgcaatgttattgcttatatctatgtatgttccgattttgggtacagttgtaacttttgcgttgccgttaccatttatactattaatgataagacataaactatctaatgtgctcgtggtttttgtagcggcactttttgttactgttattgtgagtcaaccgatgaatttagtgaagacaattatgtttggattgatagggattgttttaggatatatgtataaaacaagaaaaaagccagtggaaatcttaatagctgggacgcttgcatacttaattggttttgtacttatttatgttgcgagtataaagtttttcaacatagatataatgaagcaaatgcaaagtatatttagtgaaagtatggcgaaaagcgaaaagatagtaagtgctacaggtatgccgattagtaaggaacaaaaagagttacttgcacaaatgaatgatatattacaatcattacttccgagtatacttgtgctagtttcagtatgtttttcttggattacagtgataatatcaggtagtgttttgaaaaagttaaaacatgacgttatatcttggcctaaatttaaagatatacaattaccaaagagtatcatttggtattacgttatatttattttgttagcaacttttataaaagtagaaccaacatcatatttacatatggtattttctaacctaaatgtcatatttgcactattgcttgtactgcaaggtctgacatttatcgcctttttagcgtatagaaaaggttttactaaaggggttcctattattagttttattgcatgcatgtttattccgatgctgtttcctcttgtgacaatcttaggtataattgacttagggatttcattgcgttctaaaatagggggataaaataatattccttatactattttaatctgtttaactaactggaaggtgagttagttttactttataggagttgtatacatgcctgaatttgataagaaacagtggtttttatatcctgtttatgtattggcattttttgtgtttgtgctcatttcaattctctgttattttcatttaattatggggatagctgcttttgtcattttttgtatcgtattctttatcgttatacgatttgaacttaattttcaaaggaatttcgaaaagcatacgacagatatgattacaagagtaaagaaagtaagtaatgaagcatttaaccaaatgccgattggtattttgttatacaataaggattatgggattgattgggcaaatccttatttatcttcatgtctgggacagcatgcattagctggatggcacctttacgatgtatcagaaacattacttcttttcattaaaggagaaacttctgatgatatagtctctttaaataatcgaaagtttcgcgtttttgtaaggaaagaagaaaagttaatttatttctttgatgtaacggaacaaacagaaatcgaaaagatgtacgaggatcaaaggactgttttagctgtcatctatttggataattatgatgaagttacacaaggattagatgatcaattacgtacgaatataacaagtcttgtgacatcgcgactaaatgaatgggcacttaagtatggggcgtatttaaaacgtgcatcttcagaaagattcttcgttgtgctaaatgaaagtattttgacgcagatggaaaaagggaaatttagcattttagatcaggtgcgtgaagaaacatctaaaaggaatataccacttacattaagtgtgggtgtcggatcaggtgatttacctttatcagagcttggagcaatggctcaatctggtttagatcttgcgcttgggcgtgggggagaccaagtagctattaaacaagcgacaggtaaagttaagttctatggaggtaagacaaatccggttgaaaaacgtacccgtgtacgcgctagggtcatttcgcatgcgttaaaggatttagtattagaaagtagtaatgtcattattatggggcatagggctcccgatatggacgcaattggtgctgcgattggtattttaaaagtggctcaattaaatgagcgtaaaggatatattgtgttagatgaaaatgattccgataaaggaattaagcgtttgatggacaaagtgaaacaaaatgaggagttatggtctcgttttattactccagagcaagcgatggaatttgcaaatgatgagtcgttacttgttgttgtcgatacgcataaaccttctatggtgatggagcaaaaactgttacataaaattgaaaatgtagtagttattgatcatcatcgccgtggagaagattttattgaagatccattgctagtttatatggaaccatatgcttcttcaacagcagaattggttacagaattacttgagtatcaacctaaaaatttaaagatgacaatgttagaagcgacggcattgttagcgggtattattgtcgacacgaaaagtttcacattccggacaggggctcgtacatttgatgctgcttcttatttacgctcacatggtgcagatactgtacttgtacaagaacttttaaaggaagatatggatcagtatttacgggttgcaaaagctataaaaaatgcgtacatttataaaaatggaattgcgattgctaaagttgatagtgatgattactacgatcaagtgcttattgcgcaatcggcagacacgttattaacgatgacagggattattgcatcatttgttgttgcgaaacgcggcgagaatctcattggaattagcagcaggtctttaggtgaagtgaatgtgcagctaattatggaaaacttaggcggtggcgggcatttgacgaatgcagccacacaaatgaaaaatgttacagtagatgaagctgaggagaagcttcgatttgttattgatgactatttacagggaggcacacaatcatgaaagtaatttttctaaaagacgtaaaaggtaaaggtaaaaaaggagaagtaaaaaacgtaccagatggctatgcaaataacttcttactaaaacaaggattagctgctgaagcaacaaatagcagtatgaaaactttagaagctcaaaagcgtaaagaagaaaaagatgcagcagcagagcttgaaaatgcaaaagagttaaaagagactttagagaaattaactgtagaattaaaggcgaaatctggagaaggtggccgtttatttggttctatcacaagcaaacaaatcgtagatgcaatgcaaaaatcacacaagattaagcttgataaacgtaaatttgaaatggacgatgcaatccgcgcgttaggttatacaaacgttactgtgaaattgcatccacaagtaacagcaacagtaaaagttcatgttagtgaacaataaaaataaattaagcaaggaggattgcgtatgagtgatgtacttgctgatcgtacccctccgcataatatagaggctgagcaggcggttttaggggccatattgattgatcaagatgcgttaacttcagcatcagagttattggtacctgattcgttctatcgaacgaaacatcaaaagatttttgaagtcatgcttgggctatctgataagggagagccgatcgacttagtaatgatgacatcagcaatggctgatcaaggattactagaagaagttggtggggtttcttacttagcagagttagcagaagttgtgccaactgcagctaacgtagaatattacgcacgcatcatcgctgaaaaggcgcttttacgtcgtttaattcgcacggcgactcatattgtatcggatggatacgagagagaagatgatgtggatggtcttttaaatgaggctgagaaaaaaatattagaagtatcccatcaaacgaatgcaaaagcattccaaaacattaaagatgttcttgtagatgcttatgacaaaattgaacttttgcataatcaaaagggtgaagttactgggataccaactgggtttactgaattagataagatgacagcaggtttccaacgaaatgatttaattatcgtggcagcacgtccatcagtagggaaaacggcattttcattaaatattgcacaaaacgtagcgacgaaaacggatgaaaatgtagcgatttttagtttggagatgggtgctgatcagcttgttatgcgtatgctttgtgcagaagggaatattgatgcacaaagacttcgtactggttcattaacttccgatgattgggcaaaattaacaatggcaatggggagtctctcaaatgctggtatatatattgatgatacgccaggtattaaagtaaatgagattcgagcaaaatgtcgtagattaaagcaagaacaaggtcttggtatgattttgattgactatttgcagcttattcaaggaagtgggaaatcaggagaaaaccgtcagcaggaagtatctgagatttctcgtaccttaaaagggattgcacgtgaattgcaagtgcctgttattgctttatcacagttatctcgtggtgtagaatctcgtcaagataaacgcccgatgatgtctgatattcgtgaatctggaagtattgagcaggatgctgatattgtagctttcctatatcgtgaagactactatgatcgagaaacggaaaacaaaaatacaattgaaattattattgcaaaacagcgtaacggtccagtaggttcagtggaacttgcattcgtcaaagagttcaataagttcgttaacttagaacgtcgttttgaggatggacatgctccgccggcataaaggcagtataaaaaagaaacacatttcttataataagatgtgtttctttttttttataagaaagataaggctttcataagttaaatatataattcttacgaacgaaaaagtttttttatgaaaaaatgttcgcttttcggttgacttctttttcggttttggtacaattatattgtttgaatagatcgtttgaaaattgcggaggtgctttaataatgtcttcagtagtagttgtaggaacacaatggggcgacgaaggaaaaggtaaaatcactgattttctttctgagcatgcggaagtagttgcaagatatcaaggtggaaataacgcgggacatacaattgttttcggcggagttaaatataaattacacttaattccatctggtattttctataaagagaaaatttgtgtaatcggaaacggattagtagtagatccaaaagcattacttgaagagttaaaatacttacacgatcgtggtgtaagtactgataatttacgtgtaagtaaccgtgcacatgttattttaccttaccacttaaagcaagatgagttagaagaagcaagtaaaggtgataacaaaatcggtacaacgaaaaaaggtatcggtcctgcatatatggataaagctgctcgtattggtattcgtatggctgatcttttagaccgtgaagcatttaaagagaagcttgagcgcaatttagtagaaaaaaatcgtttatttgaaaaaatgtacgatacagaaggtttcactgtagaagaaattttcgaagagtacttcgagtacgggcaacaaatcgcgcaatatgtatgtgatacgtctgttgtattaaatgatgcattagataataatcaccgtgtattatttgaaggtgcgcaaggtgttatgcttgatattgaccacggtacgtacccgttcgttacatcttctaacccaattgctggtggtgtaacagttggaactggagttggtcctgcgaaagttactcgcgttgtaggtgtatgtaaagcatatacaagccgcgttggtgatggtccattccctactgagcttcatgatgaaattggtcatcaaattcgtgaagttggtcgcgagtatggaacgacaactggtcgtccacgccgcgtaggttggttcgatagcgttgttgtaagacatgcacgtcgtgttagtggtttaacggatctatcattaaattctatcgacgttttaacaggtattccaactcttaaaatttgtgttgcttacaaatacaatggtgaagttattgatgaagttccagctaacttaaacattttagcaaaatgtgagcctgtatatgaagagcttccaggttgggaagaagatattactggtgtaaaatcattagatgaacttcctgaaaatgcacgaaaatacgtagaacgtgtttctgagttaacaggaattcaaatatctatgttctcagttggaccagatcgtaaccaaacaaatattgttcgtaacgtatacgaagcttaattaatagtgtttagaaaaaaactcatgtccgcatgagttttttcttattcttttataaaaaaacgaaaaaagtattgcaataaatacagaatacatgttatgatacatcttgtcgtcacgaaaatatgacgttggtgaatatgagccattagctcagttggtagagcatctgacttttaatcagagggtcgaaggttcgagtccttcatggctcaccattttatttttcgtggcccgttggtcaagtggttaagacaccgccctttcacggcggtaacacgggttcgaatcccgtacgggtcatgtttttttttgcttatttttggtcccgtggtgtagtggttaacatgcctgcctgtcacgcaggagatcgccggttcgaccccggtcgggaccgccatcacgggtttataggtaaatccctttcctaaaaaacctaactttatcatacgaggaggtggtaaacaaactgtagtcattcaaaccggaatgagttgctcattttatgattggcttcctattataaaaaagctttcacagcactttacagtcgtttcataccatcgcccaggttatgggaaaagtgagctaggaaatcaaccacgtacaataaggcaagttacaaaagagctgcatatgttactaaacaaactagctattcaagagccatttattctaatcggtcattcctatggaggattatgtgcacaacattttgcgatgttacatgaagataagctgcaagcacttattttagttgattctacttcgatgaacttacaccgtttagatgaacttcatttaccaatttctgatcaaactgactcggatgatatgtggcttgaaaaatataatacatactccaaaatagatgtagacacactttataatgaactaaaacctattctcaccgatcaatcaaaacagcaaattggattctctacctcgccttcattatataaagcgacagcttctgaactatcggagtggaaaaactgtgctctctcactaaaagagctatgtaaaacattagaaataccattaatcgttatcggtagagatcctcaatattctattactcaattgactaatggtggcatgccaaaagaggaagcaacacaacttgaagcaatgtggcaagaactgatccatgaacaattacaactctcaatacatagccaatatatacttgccgaacatgctggtcacggaatcgaaattgatcggcctgatattattattggggctgttcaatctctataaataaaaaaaggaagcaactaaagttgcttccttacttatctattcataatcttcttcatcatcgatttcttcgtaataagcattcccattacttacataaatagggccattcgcaacatcaatacgtaatacccatgcccatggcacagctaaacgcttatgtattgctcgccaaaagctcattgattttctttcgtactcctggaactcctgaagtaactctttataggaggaaccgtctaactgaatatttgcttctagcaaacgagaatgggcatagtactgcagctctagttcagcagcaatttccatttcttcttctgttgccataccaataattgttccatctgctggtgcaatttcatatacgttgtgaacttcaataagcccttctttctctttctcaaacatgtaaacagcctcctttaacatatattttttatgttacaaagtcatacttctacaataacttctctctttcctctttttttgataaacttttacaaaatatttaaccgatgacctgttttctctattctttcagcagaaatgaaacgatttttatcaaaatttaatttatacacatcaggcatatgaagtgttttccaaaactccaaatcatatttcgaattaaaataattcattagtaataccataatattcccatgcgtacctattacaatattcttaccttcatatttttttaatatattttgtatacatattacagcgcgcttttgtgctacagtatttgattctccgccttcgtatgcaaaactccaatctttccacacattctgcatagcatcattaaaatttgatactggctctgtgctcaataatctttcacgcaaatcttcttcagtttgtattgataatttatatgtattcgcaattccttttacagtttggattgctcttttgtaaggactagaaataacaacatcaatatgtttatcttttaataaatgcgttacattttctgcatcacagtgccctttttcagataaaggtcgttcccgttcttcttttgtatatgtagaatgggcatggcgaacgaaatatattgttgtcatttttcaacctcctttcttattttccatctatattcaataataagattggaaaatcctgtattacaaaagagcatttttcataagtgcccctttgtttacataataaaattatttcattataatttatttctgaatttctcacttatgacaatatctcgaataaagtaatccatattacttagaagtttttcaaatgctttttcactcaaattgttcatcataaagacaatctcaatcttattcccttttttatcagtaccatagaaactatttgttaatacaaatgccgtagaaccacctttctgtccagcaaattcgaatataccctctcctacggttcctttaaatatattctcaacctcaccttgcatttgtggtgtaaaataatttctgctatttatcttttccaataaactcatgtaatccttagcatttgcacctataaaccgatctgaccaaatacgctgaaaatccatatcggcttttaacgatatctcgcgttttgtccattctttctcgtctttcatccattcatgtatttgccatacatgcttaacatattcatcattagacatattacgtagcttgtccaatgctttattttgaggaatatgcagttctttttcaacatagcccctcatatataatgcccctgtatacgttggataaaattcatcgtgactatttaagcctaactctttcaaactttcatttatccgcgctgctccaagcttgtccaataaatatgatgcattcgcattcgaactataatggatcattcctttcactacttcttctaaagaagtttgaccacccttcactaactctttaccttttacatcatctagccatgcagggtgtgcaccaccatcagtatttttctaattctttcaatgaaattttctcgtcttttcttatttttccttcagctacttgcttagcatattcaattgctataacgattttcgacatacttgctagcggtaatttttctttttcatttattgatgtcaatgtttcaccatttcttttaacaattaaagaagttgttttatcatccttatgttcttttatgtaatttagcacataattagagtcttctttggaattgacatattccttcactgaaaagaaagctatacagcctactatagtaattccagctataattccaacaacttttaatcccctcatgatactccccctaaaataaacatattatatattatactaaataaatttccctttttaagtaataattagattatttatacaaaaacacttcttttcttaaacaacaaaaaaacatgccttcattaggaaagcacgttttgtgatattcttcacattgtttagttaaaaaataaatgtttacttaccatgatgtaacattaaatcactaagttcttcttcaatgtgatttaatttcgcaacgccttctttccatttatgaatataacgtgaaaccccaacgaaaaacaaaacaataattgtggaaagaataataccatatacgattgctacagtactcatagttacacttccttataattagtaatgtggttattagttatatttttattataaacctttttcttttaaaatacttcgatttcaactttttgtaacaaaattgatttttctaacatttcgttcgtgaaaatggcatatttttcacaaattatacaaaacttcaccatatgtactattaccatatgagttatattattaaatagaataaaggggatgatatactatgacgacttggtttattgtaatgttagttgtatttggagcatttaaaattatcgtttctagccttcctaacactgttattgaatccattattagcaagtacgaaacacatccaaaacttgaagaagagaatgtgactattacaattcacggaaataacgtagaaggcgaacagaaatcaaaaattattcatgattttaacgaaggtttatttttagatcgctattatgcaccaccacacaatgagggtacgcctttaattatcaatgcaaaacgtggcaaaaagaattttacattttatatttatagtcacgaggagcatgttgatgttgtaaaacaatataaaaagaaggtagttgcttatagtttacgctctaaaaaccttcaaaatagtgatatgttcgtgtcagctgacttagcttaatactcatatattggaaaaaggaatccacgaaatatggattccttttttctcatttactgaaaaataagctctgtcttcaaactatctttcggtaacaaccagccttttttctctaaactcgccattaataattccctttgctttgtcgcaatactttcttcatttgttttaaatgacacttctattacgaagtcatcttctaattttccggtattacttaatggccaaatttcaatatttgcttttatgttttcaaactctcctgtatatcgtttcattaatacaggaccgtaaatacgggaattctttaacatttcttctccccaatttgtatacaaccatttgttcattttccctggtaatctttctattaacatgttttgagcagcttgttcatttggtaaatcaagtatcccatatcctttagcgctgtaacttttcttatttgaaatgcttaatgttttcttctcaaatccccaatctatttccgcctcataactatccgtattactatcgaatccttcttttttagctacttctagtgcatcttgaattacaccatttggaataggatatctttttttatatgttaattcaaaatctttactaaattctttctttcgaattctagcaaaccaaccttcctcgcttaaacttttattcgcagtatctaaaaattgcacttgtattctttcatattttgtaccagcctggaaatgttctagcacctcttgcttcatctctttgttatcacctaatacttgttctggcttcaataataactttacttcaaaactaggtttcattggactagctgcaaacccttccttaacgttataaaggaaacaacaaaagaaaatgcttacgaatacaaatacttttttcatatacctatcccctttacatttcaaatgacttctatacgttccattgcaagtgaatatacattttcataccctgctgtacttagcttttgttgtaatcgatccgtatcctctttcaaagcgtgcactaacaccgtatgttctggtaataatgtatttagcatctctttaacgtctcttatactttggtgaactttatacggaactctcttcaccctacatgtactccttacatgttctttcataactttttctgcaaaactccctttcgcaatatgcccagtaaaaataacggcattccgtttttcattccgaagttgttcatagtataactgtgctcgtttcgtttgcatattcgcatcactcattacaactattccgtaactattttgcatactaatgtcattatccataactattatgtttctttttaaactctccataatccatttaagttcttcattattttttatccaacctttatatatgaacatctcttcaaatccagccaaaatttctttatctactataagcggaaattctttatatcgttcatataaatacaatactatatcttgcgccctaccaagttgtggcagcggtaataatgctattccttcattttgcataactcgttcaatttctgcacatagatcgtctaatctttcattttgcgaaacatcatctgtgtgataagcggcatctacaattgcaacttttatattgtggcccaatttctcaggtaaattagctcgtagtatgttagactctgctgaatagtcgcctgaataaaatacgtatgtattacacatatcaactaaaaaccaaacagctcctaatacatgcccactatacccccactgaaaccgcaatgtaggagtaatttgtaaccattcatttggattgctaatctcatcaatacatacataatttaaatcttttatatgttggtcgctataaggtaaattccatccttgcattacattatagtttctccatttttcataatataacggcagttgctccttcgtataacgagtcgtccaattttttttcttatagccatacttcgctaataaaggtaaacccatcgtatgatcttcatgaatatgtgataaaaataccgcatctaaaaatggaacagcttctctctctatttttggataaccatcctcataagatcgattaataccacaatcaaatactattttcgtctctttattttttacaaaatagcaagagcgaccgtattctcctgctcctccccatacttccactctcatcatgctaccccttttcgcttttgctccatatgttgcagcagtaataagcacattgttgtaagtccaacagaaacaacggccatcgccattcctatagatacttcaccctgttcaaattgagcaaaaataaacgttgctgacgtttctactgatggaggtaatacgagaagtgatgctactaattctcttattgaaattgtaaatgtcatcgcccatccggcaagaatgcctgggataataagaggcaatattatttttctaaaaatataaatataatttccagaaaaaatacttcctgcctgcacgagagaatcatcaatttgtccgagtgatgattttacatattgcaccgtgtaaggtaaaaacagaacaacatacgttacgataaccatgattggtgtattataaattgacataggcatatatggtgaattccaaaatagaataagacctacaaccataacgattcctggtaccatattcggtaacataccgcacatatcaagccatttttcagaggtttttttcccctttcgaatcataagtgccaaaaagactccaatcattaccgcaataatcgctgttacgagtgaaaaaagaaaactattccataaagcctctaatcccggagaccccattgtaaacaatgcctcataatgacttgttgtaaagttatttacatgtaaaccgccgcctcttaattttgaaaaagaagcaataagtatagaaaagtatggaattccaattgatacgattaataaaccaattacatacatccatgctacaacgcgcgtaaatatagacaaagtatatcttttagatttcacaccttttccactaaccattgcatatgaatactttcgattcaatacattttgcatataccaaatgagcatacaagcactaagtaataaagaagataatgctgttgcactactgaaatcaattggccaactcgaaataaatttatgaatttctgatgttaacacgtggaatcctattctacgtccgaatgtagccggtgttccaaattcagcaatcgtctttacgaaaatgagtaaagcacccattacataacttgatactaataacggcaatattatttttcttaagcgatagaaaaaacttccgccatgaactgctgcagcttcttctttactactcccaatctgaagtaacgtgtttttcagcatgaaataaaggaatgggaataaatgcagactcataattaataccatacctcctaaactaaaaaacgatgatgaaactgtctttagcatcgggaaaaattgttcaaaatagccgttaggttgcatgaacaaaatccagcccatcgatccaatatacggcggtgtcataaatggaatcataaaaacaatatctaacttactatactttcctacatctgttttgctcataataaatgccaatggaaatgcaaatattgtagcacctattacaacgagtgcacctagaagcatcgaatttagaaaaatcccagctaatccaccactctgcatcacttcaaaaggctttaaaaaattccaactgctattttcatatacactagaaaataaaataagaaaaagtggaatgacgattaacatcgccacaagtaataacgctaccgtcattccaacttgtcttactgatacgaatcgatttaccatggaatcaccatcttattgaaatactttcttaaattgttttcctatttcatcttgctctttctcaactgttttccaatcaatatttaatactggaatctcttctacatttggtctattttcagcttttatatctgttctaccaggcaataaatacgctttagaaacttgtttttgtacatcatcggataataaataatcaataaactcttttgcaccttcaacatttttactatccttcataatcccagctacacgtgggctaataactgttccgctttttggatatacaatatcaacaggttcaccctttgcttttgcgctatacgtcatataatcaacacccgcaatgaccatatctttcgcacctgttacaactgggtctaacgcttcctgatttgctcctgctactgtaacttcatttttcttaagctgctcaaataaattccatccatcttgtccattctttttcacgtatcctgttacaaagtctaaagctgaacctgaaagtgctggatctggaagattcactttccctttccattctcctttcgttatatcgctccaatcttcaggcgctgtcttcacattttttgtattgtacacaatccctaatgctgaagcactatacccgaaataatggcctttatcatctgaccattcagaacgcagcttatcagcttgtttcgcctctttataagctaacgtttgaccctctttctttaatccttccatcgctggtaaggaagcgagtacgacaacgtcaacgactggatttttcttttcagcttccattctcgctaaaattttaccagttgtcccttgaaacatttccacctttataccagttttcttttcaaagtctttttgaactttttctgctaacccttttggccctgcactatatacaacaattttcttttcattcgtatttgtactttttgcatctgcattaccctttgaactacaacctgttactacagccgaaaataataaagtacatacaaataaagacttaagcgaactgaatttcttcatacgattctccccctatatgatgaatacatttttttggcacatataacgatactggtttaccgatgcttaatttactattgtgataagctgtccatattccgagtgcccccatgtttacttttatttcataccgttctcctacatatgtaacgtgcttaatttcacctgtatacatttcgcacacttcatttttcgtccaactcacatgctctggacgaaccatttttttaccctctacaagccaattcgccttaccaacaaatttggcaacaaattcatgagacggtttcacataaatatcttcgggtgttcctttttgtaatactgctccttgtttcatgacaataatttggtctgacattgacattgcttctgtttgatcgtgagtaacatacagtgcagttaaaccaatggaatgaacgatatccataagctctattctcatttcttctcgcaaaattgcatcgagcgcacttagcggttcgtcaaacaaaataaaatgaggttttgttacaattgctctagcgaatgcgacacgttgttgctgtccaccagaaagttcgtgtggataccttttctccataccttgcaggcgaactcgctttattgcatcttctactttttctcgtaaatgattcgtttgctttgtagctcttaaaccaaatgcaacattttcaaaaacagtcatgtgcggccataaagcaaaatcttgaaataccataccgatattccgttcatgaggagatgtctttatcttttttgtagcagaatacatgcactggtctccaaaatatatttctcccttatccggttcttcaagtcctgctatcattctaagtaaagtcgttttcccacatcccgaaggtcctaaaagtgtagtgaattccccttgtttcattacaatctgcaacggctttaacgcttgtgtttttccaaatgttttttctaatccattaattttaatatccatcgtctcacctctctcccctcattcttaacctgctttcattctatatggaagatttatacttaatgttaatgtactgtaaagattaaattaaaaaacttctaataaactatttatttctatagattttttctatagttaaaataaaaaaggcggcaattcataatgaatctcttaaaattagaaattgtagtacttattaagaaatacaaaaagcttacaatcgttgcagaaaaacttggcgttaaacaaccaactattacttttcatataaaaagcttagaagaagaactcggtgtgtctttattcgaattacgttctggaaggtatttcttaacagaggctggtgaggctttgcaccattatgcttgtaaaatagatgcacttatgaaagaagctagacgtgtcacgcaagagtttaaagattttcataaaggcgctataacaatcggcgctagttatgtaccagcgacttatcttttgccagcagtcgttcatcaatttcaatgtgaatttcccaatataaaaataacgctactagttaaaatcgcccctgaaattcgaatgatgctacaaaatcacgaaatcgatcttgggataatttccgctgctccatttgatgaaccacttttaaaacaaacgaatataatgcccgatacacttgttcttgctttttccaaagaacatcatttttcaaagaaagacaatgtatcgttacaaaatatagaaaaggaacgcatactattgcatcgtaatccatctacaacgagagacttacttacacaatggacgttagcgcacaacattacattccaatcagaaattgaattagactcattagaaacgatgaaacaaattttaaaatatggtaatggaattgccttgatttctaaactggctatcgaacaagaaatacaacgaaatgagctatgctatataccaatccctgaatttgaatttcagcgtaatatttatacgattcatcatgaagacagatggaattctaaaatcatttcttttttactacagagcatcactacatttgcaacaaaaaattaaaaggctgtcgttatgcacgacagcctttcaaactataaatctatttatttttctttgcctcaatttttgcttgcgcctcttcagccttatctaatgcttctgatactttcttctctttttctttcacttcatctatactatcgacagctttaataattttatcgattccctcttcttctacctttctacgctttgccactctttcatttactttctcttccacatcttttgctttttgaagcatattctctgcatttgatattacagctttttcaagttcatcatcttttttcttttgtaacacttcatttgcaatgtctttcgcttctaaatacttaccgtcttttaatgctgttgctccctgatccattttctcagcaacttctttatatgatttcgcttcatttcctgatttctctttttctgctttttcgaaccacattgttgcatcactatacttttcatctttcaatgattgcatacctgtttcaatatatgtgtcataattgctacatccagccattacgactaatagaaaaagcataacaaaacttaattttttcatgctgttgtctccttttctttgcaagctcactttactttaacatacatgaaaaagagtttcaaaaactaaaatactaatttagtcatttttattttattaagtcacatttccttttagacagacacatccacttgctttttcattacatgcttctttactcctactaatacaactaacaataaacctacgcctaatgtcatcataacaatgctagttggcaacatatctaataataatccatacacaatcataccgagcggtgcgattgcagtagaaattgtttcaagtaagccgaaaacgcgtcctaaataacttggatctgtcgtcttttgcaaatgtacttgcatcgggatatttacaaccatcattgatataccagttaacatcataaaagcgatatagtaaataaaacttgctactttcgggatggtgactactaatggaaacactgtacataaactcaaactcgcaaataaaaacaacccaatataaacagagcgaaacggatcattcacttctttacgtactgataacgcaattgcaccaattaacatcccaactgctaacattccctctacaacaccgagttgtttcgaagatagatgcaaattttgaacaataatatatggaagtgaaacgaaaagtgcactcgcaaaaaagtttacccctactgcaattttcattaaaccatatatttcatgctgtcttttcacatatgaaaacccttcttttatactcgtcaagaaatgctctttactttcagccttttcttttttgtataaatcaaatacgataaacaattgcacaacaaccgctaaaaagaatgtaatgctattcaataggaaaaacgatttaattgaaaagaaaccaaatacaactccgccaataatcggtgctaaaatatttgataaagatgctgccgtctggttcaaggcactcgctttttgaatacgtccttcatctactaaacttggaatagatgaagttaatgaaacagagtaaaaactcgcacaaattgataataatgctgctgaaacataaataaacagaagtgatggcccaaaagtagttgcaaggataaacataataaacattgttaaactacttaacaaatcggtaccgatgacaagccattttcgattgacgcggtcagctacagcaccagcaattggtccacagattagccttggaatcgatccacaaataagcgtagttgcaaaccccattcctgaacccgttgtctttaatacgtataatcccattgcaaacgtataaataccggctcctagcaaagacgtcattttcccaatcatcattaaaataatatttctcgttgcaatcttcattcttgaatcattttgtcctatacttatatcccccatttttgacactctccccttaaaagttaaattgtgttaaacttattatataattaactttccaatttttacaacaaaaagtttaatgacatttaactttctaactataaaggagcaattatatggctactctcggtgaaaaaattaaaacgttacgaaaagaaaaaaagcttactcaaactgatctagcaggttcagaactcacaaaaagtatgctaagtcaaattgaaaatggaaaagctacaccttctatgaaaacactacaatatatcgctgacaaacttgaatgtgaaacgagttttttattagaagaagatgatgtagaaattgtaggactcattcaacaaacggagaaactaataaaagcaaacaagtacgatgaagtatatgaggttttactaccgatcgttcaaaaagagctacctcccactttgaatactgctcgtttatataaacagtttgtaacagctgcggctaaaatgaaagattacaatattgaatattacgttgaaaaggctacttctatttttgagaaatatacgttataccgggatagtacggaaacaaaattaaaattatcctttacgatattcacacgtaaaaaatatgctgaatgtttacaacttatagctagtatccgaaatgactatgaagagaaacatttagaaatggatctcattatacatatcgaattatatttatatgaagcaattatttttcttgcatgtggtgattacgaacaatgtgaaagtgtcattttagatgcacttgcattttcaaaaaaacatcaagtgtattataaaacagatgaattttatcgtattttatcttatcaaaaagtaatcacggctgataaagaacaatatttacattacataaaaaaatcagagcaattcgccatttttacagaagataatttctctgcggcggttattgatcttttaaaagctttctactacaacacaattgctaatgaatatacaattgcattagaacatttagaacaatttcgagaaaaattaaaagatgagccaatttttcaagatgatggatcatattatcttgaaaaaggaaaagctttgtatggtttaaaacaatacgaagaagctttaaaaacattgcaacgcgctatcataccagattatataaaccatccacttgatcacgcacggcttacaacagctggggcatatcgcgctctttgttatgtgaaacttaatgataaaaaaagagctcttgaagaagtaacagaagcatatgaaatcgtacaggcctatcctgattccatcttcacttcatttattaaagaaacattacaaataatacaaaaactttaagaatgtctctaaatggtatattattcctcttttttagcaaagataataatgatgggaggaatataaatgaatatacaacgtgcaatagagctttctatgtcagcagaacaagccaatgtcaattttcaaggcatgcctgttatgattcaacacgtcgatgaaagcaatgaaaccgcccgcatatatgaagtaaaaaacccaggacgcgaattaactgttccagttaatagcttagaggaaatataagaaatgccacttctcttttgaagtggcatttttcttctttcagattacttattataaatttcttcaactctttattttacatgagctgaaaaaataagaattttctacttcttttctttttgtgacctgctaaaatacaaactatggattaattattcgtactatacattaaggaggaaaaataatggcatctaatttagaaaaaaaccagccttattatgcagttatattcacttctaatttatcaaataatacaactgactataataccgttgccgaagaaatggagaaacttgcaaagtaacaacctggatttttaggtgtagaaagtgcacgaggtaattctggactcggaataacaatttcttattgggaatcacttgatgcgattgaaaattggaagaagaacaccttacataaagaagcgaaaaaaagaggtcgtgagcaatggtatgaaaacttccacctgcgtatttgtcttgttgagaaagaatttaagtttcatagaggtactttataactatgaaggaaaaattagctctcgttattgttcatgaaatatatggtgtgaacgaccatatgcatcacgttacccagcactttacttcatctcatatagacgtattctgtcctaatcttctacacttacaacatgcatttcattatcgtgatgaagaaaaggcatatgaacattttgtaaatcatattggatttgatgatggaaaaaagcaaattgaagaattcatttctcatctttctagtagttatacacatattggacttatcggctttagtgttggagctaccatctcatggctatgtagtaacaatccgaaaatagattttattatcggatgttacggttctcgtatacgcgactatgttcacataaagcctacatgctctacattacttatattccctgaaaaagaagctagtttttcagtatcctctttaattcacacattgcagcaacaaaagaatcctttattagaaataaaacaactacacggtgaacatggatttctaaatccgtacactgaaaaatataacgggcactctacaaaacaagcatacaatttaatagattcatttcttgtaaagtgaaacttcaatcagtggggggggggcatcccccacctaatctcttttcttacgttgagttttaaggtgtgggtcttactgcccatgcgtgataaaaacaatcttatacaggagactcaaaatgacgctgacattactcttacttgttttcatactcattgcctttatctcagcgctaactatcatttttaaaaccgtaaaaaaagggctatttttcaaccgcccctacttacaatctattatcgtttgccttttattttttactaattggatcttatatgtaacaactttttattcgttacttcccgagaaaattagtgagttcctattcctacccatttggtttttcctttgtattttaggttttataactttctggcgtgaatggggaaataatcgtgtattctccatatgtatcggttttctttccttgactagttttttatttggattattgttgttagttctttccgggatgtaatagaagaaggaagaaaagccaactttcaacttttcttccttctatgtttacctttagttttcactgtcactgattcacaaggtgtataatatatttgaggtgtcgccttatcaacaaacatcataaacgtaataaagccgataataaagaaaataaataacgttaacaaaattgctcctatcgttaaaagtatcataacaccacccctatatttttcatgttattacacttttcgctatgatatgagtgtaatcctttttagaaaaggaaacgtaacaaaataatcacaatcactcccgttaatactgtacctaataaactacgagtatatatcgctacaagaaatgttggaattgctgcaataagataatcccactgcatcgtttcatgcataaataaaacttgtgctaaaagcgctgctaatatcgcaattggtatgtaatttaaccattttaaaccccagtcaggaatttgtagtttgctaaatacgagtagaggtaaaatacgtggcacgattgtaacagctcctgctgctagtaaaagtaataatacatctaatctcatttccatttttcaatcaacactccaatcgtcgcagctagtaaggttgcgataataaccgctatactatctggcataaataggtgtgaaacgtatgcgataataatcgctacaattgcaacacttaaatgaattgctagtttcggtttactacttatgagctgaagaacaaataatccgataaacatcgctggtaatgcataatccatgccgtatgtatgtggatctggtatccactcaccaaatagcccgccaatgatagtggcaagaatccaatttaaatacgctgttacattaagccctatcatccatctttcacctaaatatcctttttgcgcagcatgctgcactgcaacgccgaaagtttcatctgtaatttgcgaaccgatgattaggtttttaaatagaggaattttcgtaaagtacggtgcaagtgcagcactcataagaaggtggcgcaagttaacaaaaaatacagtaaaaataattgcggaagcaggagcaccggctgcatacataccagctaatataaattgggcagaacctgcataaattaaagtggacataaatgcaatttcaatgatggagaaaccagctgtttttgcaattacaccagctgctataccgatgctcaagtaaccaaatacagttggtaaacaatcttttactccttgctgaaatgtatcgtcactctgcaaagctacatgtgcctgagctttactcatctctatcatcctccattccttctaaagttcgttttcctgttacgacatgaactaaatctatattttcacgccataacgtatctaacttatcagctccaaattcctttgtgatttcttcaaccataatatcgtgccgcacatactctgtagcaacgagaactagcgctgggtcatacgttgtaacggcccatgaagtgctatcatttgagaagttcgcaattaatacttcctctccatcacgagcaataacagttaaatgaccacccattctcttttcaacaacgtggggcgtcatataattatgatgaaacgtcgctcctatttttgtttctggagctccaaataagattgaaaatatatgtacgccttcctcttccttttgatgaatgtatggctcaatttcatgcacttgttcttcccatacagaaatccataattcttcctttgccctattaattatattgcatatttcttttaaaacacgatcatttgagcgaatatgcgaaattacatctatttgtcgctcttgttctaaacaatttaatttctcatctaaaaattcaaaggacttttcaaagtcttttcgcattcgattcattaattcggtagctggtactggtacatatttaactggttcagaaggtacaatatgcaccgctcctttatccattaacttaccgagtacctcgtaaatcatagaacgaggtactcctgtttgtttactcacttcatagcctgttactggagaatgttttaacaatccaatatacgctttacattcatattgggaaaatcccaacttttgtaattcctttataatttcatccatcggtaacccctcacaatctaaatcgctcttacttcaaaacgacgattttgcttccctttactttttactttatcaataacaagtgttcctatttcactcgtatttttcacatgtgtgcctccacaagcttgttcgtctaaattttcaattgtaacaatgcggatttcttggatagtagttggcaggagatttattgctgttttaatcattcctacagcattttctgcttcttcgcggctcatataacgagtggaaatttctttattttgcttaataagtttattcacttcctcaacaatttcttctacttccacgctcgataactcttgtaactcattaaaatcgatacgtgctttatcaggataaatttgatttccggtgcataaagctccatacttttcataaacaacagctccgataagatgcagtaaagagtgatgacgcattaaattatgacgtctttcccaatttatctctaatttaactggacctaactttacttgtgcttcgtcttttatatagtgaactatttctccttgctccttctttactttttcaacttcaaatacagacccatcttgtacaatgacacccgtatcacattcctgtcctccaccagttggataaaaaattgtttcttttacaaatactttattcccttctactcttatcacttctgtttcgcaactcgttttgtatgcatcttctaaatataatgccgttgtcatactctcacctctttagtagttatagttatacctactaatataaaaaagaagctctgcaaagtcaattgataattctgaaatttaaaattaataaaagactcctttattaggagtccactatctcaatatttcattcgcttctttttcataaattttatcaaatgacgtcataacgcgctgtgatgcttgaatcatcttttgatctgtcataagatctgccatctctttcgtcatatcaacatttgaattttctagcatatgattttttactattcctgttccgttcggtaaattagcaatgtttccttctgctagtgtaaagcttttgttttcacgttgcacgagacgtgcattcgtttcggcatctactgtttttgtttgcaaacgagcaatattattttgtgttacctcatcatataatgtaccatctgcttgtacagcaacctttgctccttctggaatacgaatacgctcattattctctcccattacgaaagcaccagatgatgtttgtaaataacgatcactatttaatgtgaaactaccatctctcgttaaaaacgtttcatcatttttagaagtaacgaaaaatgatgttgtgccggccgcgccgtcatctaaaaagaaatctgtagcgctatttgtcatttgtatatttccttgtactaaattcacatgcgttgcagctggtactacagcgtaatcgaccgaaccgatatttgttaccgccccatctccgcggcgatatgtgtcttgtacatcaaatactttagacgtcatattttctgctttaaatcctgtcgtttgagcatttgcaacgttattcgaatgaacattaatgcgctgcatgtaattcatcatgcccatagaacctatataaagaccgttcatattcgtttgaataaggcaagcgccttattcttcacctcttttctacgatgtttgtaacatttgtttcgctaaatgttcagctgtagcgatatgtatatttttctttatgtcttggccatctgtcattaatacaataggagctgatgatactgctggaattttcaacaattcgccactacttgctgtttcatcaaatttcgtaaacacaataccatctatatgaatatctttaaagtttgtaataatttcaatcatatctttacttttcattgaagctgataacgttaaacaaatataatctggttctacttgtcccatcgtttcaatcatttcttccactgtttctgacgtacgataatttttccctgctgtatcaattaaaatataatcgacgcgtgcttcttctttaaaatacgtaagcgctcttgtcattgcagcttcatcacgcacagcaattacttcagatccaattgtctttacgttatcttgcaattgctgtactgttcctatgcgcgaatgatctgtcgttataaaaccaactgtttttttcttaccgtgaaattgccatgccattttcgcgagtgtcgtcgttttaccaacgccagttggaccgattaatgcaattgtttgtacttctttttcaaagacgttttccgtattgaaatgagatttcatatcttccaatatgtacctgataacttcttcttccgtaatcatcgttgcattttcaaactttatttttaacttttcagcatatgcatgaatgaaatattgttccacatcgttttgttctagcatccgaattactttttgaataataaacggtacagattcttgattttctttctttggaactacttcttctttctttactggaacgacttgtttcacaacttttttctttttcgttactttcgttacttccgtttctttcatcggtttcacaacgacgattcctttttcaaacagctttaatagtttctctttttttcttgcccattcttcactatttcctgtttgcatcgccgcgtatgacatagaagtcgttacgttttctaaattgtgcagtactgattgaattccattcgccttcacaatttgttctgaaggatcattcacaacatccattaactgttcatgaaattgagctgtaccttcattcacttcttcctgtttttcttctggaaaagcaactaacatttcataatcctttttccaaaaaaacggtatatttcgttttacactttcatcgacaacataataataatctgtaccatattggtcaaataactttcgatacaattcatttttcgaagctgcttttattcgcattaacgcttctttcttttctgtactttccattacttcaccccctactattcaatataggcaatttgatccacaacaatttctggtgctaattcactaatacaaagtacttgtgcttccacttgataacgttctagcagtcttacaatcgcaaatctaaaatcttttctacgtgttaataacactggttctcttcccattaaacgtgcttgcttaaagacgcgctgcacttgctcaacgacacgtgtttctaaatctaaatcccagtttaataagtaaccttgatatgaattattcacaacatccgcatctaactcgattgaatcagagaagagcgctgcatatatttttccgtccggatttttcgcattttcacaaataacttttgaaatacattcacgaacaaatgatgttacaccatccacgtggttttgataaatttctttgccgtcaataataccttcaataattgttggtaaatcacgaatagaaataccttcttttagaagttgtttaataacattttgaacaagtgataaatcaatttcttttttcttaatctcttctaatagaacgccattatcattttcaagcgagttaattaagtcttttacatgttggcgctgaattaattcatgaagattacgtctaacgacaacatctaaatgtgtaattaatatgctaagtggctctaaaacttgatagcctttcatttgtgcatcttgcaccatatgctctaaaatccaatatccatcttcaccgaaaattggatctttcgctggctctgcatctaaatcagccattacgtttggtgttttcagtgctaataaataacctgattttaaaacaccttcagccgccttcgcacctttaattcgaataatgtaacgtccgcgtggcctaaagctcgtattatctttaaagttaattccaggaacgttaataccaaggtcagtaataattgacttcctcataagaacaactttatcacgcgctgtttccccgttaattttttgctttacaagtgctgctaaatctaaaccgagttctactataattggatatttatccgtaaatactccgaatgaatcttccacttgttgcagttgttcatcttcgccttggatcatttctatttctttttgaagctcgtcttctttttctttctttattcgatttttattacgaattcctaagaagataattgttccgccaacgagtgcgaatggtagaaacggtagcggagtaaaaatacccattgcgataaataaaccaccgagcgcatatacaacgacttcatgcgctaataactctttaaagataccttctgttactgtatccggtgaaccgtcaaatacacgcgttacgataatacctgttgaaattgcaagcattaacgaaccgatttggtttacgattccgtcaccgacagttaactgtgtataatgaagagccgcatccgcaaagctcatcccttgctgcatcattccgacaattaaaccgaaaataatgtttacgaataaaatgacaatcccgaaaataacgtcccctttaatgaactttccggcaccatccatcgccccgtaaaactctgtttccatatttaatttttttcgttttgcttgtgcatctttttctgaaataatacgctggtttaaatcagcatcgatagacatttgtttccctggtaaagaatcaagtgtaaaacgagctgcaacttcagctgtacgagacgcaccgtttgcaacgataaactggaatatgattaatactgtaaaaataacgataccaattaataagtttccgccaattacgaactggccaaactcttcaataacatgacctgcatttccatctgtcaaaatcgctcgcgtcgtcgaaacgttaatcgatacgcggaaaatcccgattaataacaacatcgttggaaatgactttaattcatcccactcgttaatacttgtcgctcgcatataaataagcactgacatacttagtagaaaaacgataatgatatcaagtataaatggtggaagtggaattaagagcgccactacgaatgacgctgctaaaaagatagaaaaataggttcttgcagaatctatcttaaacaaagagatctcctccaaacgcgctattatacttcaagttcattcgtctgaattaaatagcgcataacttcaattacagctacatataaatcttctggaatcgtctcatcttcctcgacttgataatataaagaacgagcaagcggacggttttccaccattggtatttcttgttcacgggcaagcgttcgtatatataatgcgagctcatcttccccttttgcaacgacaattggtgctgcatcaacgtgtttattgtaacgaagtacgaccgaaatatgagtcgggttgtttacaataaacgttgcgccatccatcttcttcgcaattgttccttgcaagattgcatgcataaagttttttcgtttccctttaacttgcgggtccccttcattatctttatgctcttgtttcacttcttcttttttcatcttaatatcttgctcgtactcccatttttgataaatgaaatcaataatagaaagaacgattaaaataattaaaattgctaagaaaataaatttaatttccctaataatttcagtaagggatgcagtccagttaaatccaatcatactgacaattttctctaaattctttttaaagagaacgtaagcgacgtaaccgattaatcccatataaaatagtgatttcaaaatatctactaaacttttacgactaaacagtctcgtaaaatagtttttcggattaatacgtgacgctttcggtttaatgactttagaagaaaataggaagccgacttgaatcatataattgaataaatgaaaagcgtatacgagtattaatatcggagccgatactttcagtaataaaatccccattaaataaaaatactcggttgaatctgtattttttccaatttgatcaaacagcaccgctacggaatttgcaatctcataccctagccaatctccgaagaaataaacgacaactgctaatacgagaatggaaaataaattatttaaatctttactccgggcaatgttcccttcttcacgcgattttttacgcttctgcggggtggccttttctgttttattatcctttgccatgcgcgtccccctacttcgttaagaaaaagttaaatagtttcgtatactcttcaagtaatacatccgtcatatttttaaacacataaccgagcatcggtacactcatcgcaataaacaaaatcccacatgtaattttaattacgtatgcattcataaaaacgtttaattgcggagcgttttttgcaattaaaattagaacaaagttaatgatgaataaacttcccataagcggaagagcaatttcaaccgctgatgtgatcgcaaataatagcgttgcgagtagactatctaagaaactagtcgtcaacaattttgaaatcgcctctgtatattgaaacgactttaaaatcgtggcaacgaaataattaatgccgccaagtgaaataaaaataatgagaaaaaatatatcaaaaatggttgatagtaaagtagactgtgagcccgcatttacatcaaacaaacttgcttgtgataaaccgatatcaaagtctaaaatatgcccggccattttcggaatgttccacagcatttctacaatttttgaaagtgataatccaattacaatttgcgttcctgcataagctgcaacgtcccaaactgtcttgatgtgagagacatccacttgatcagccactgtaattgaaagagcaagtccaactgtaaccttcgccattgctggaatggatcgtcctgagaaaaacggtaaaaaatataaaaatgaagtaatgcggcaaaacgcaaaaaacgttgccgcccataattccatattcatttcagttcacctatcttagtacgaacgcaatagcgatgggattttatcaaataaatctaaaataagtgtcgttaactcttggaacatccacggacctaaaatgataataacgaggacaatactcgccattttcggtaaaaacgtcagcgtttgctcttgaatttgcatcatcgccataatgacagcgatgataataacgacaatcatacttacgccggcaaccggcattaaaatcataacccctttataaaaaaaggtttgaaaaatatctataattggtgacgtattcatttatatgactcctatcacatagcatcaaacgcttcaggcgaccgttttaaacataatgtcgacgatttttgtatatccacctaaatatacgaaaacgagtattttaaacggtaaacttaaaatcatcggcggtaccatcatcatcccgaggtacattaaaagtgtactaataatcaaatctataaatacaaacgctaaataaatgaacatccctgttagtaaacctttttgaatttgcgttaacgtaaaggatggtacgagcgtaaatagtgaaagatctttcaaatctttcggcaactcttctccgcgtactttcagcatcatttttaaatcatgcttatacgtatgctttgacatatattctttcataataggagctgtcgtttccgcagcttgacttactgttattttctctttcgtcatcggatcccacacatcactcttcagttgcccgagtacaggctgcatcgtaaagagtgataaaaataatgcaagtccaacaagcacttggtttggtggtaaattcattaccccaagtccttgacgtgtaatccctagaacgatcataaaataagtaaaatgtgtaaataatagaacgatagaagaagataatgataaaagggtaacgagcgcaaatagttgtacacttgaattactcgtaaactcttttccattttcgaaattaataaaaccgttcggggctgcatacgctggatttacaaaaataattgaaaaaacgatagaaaatacgaaaataacggctaataatgataactgtttctttattctcatgatggatcctctacttttttcgtttcactcttcaccgcgtcttctagtgcttgttgaaactgatttcctgttccggttaattgcacagactgcacaccgttattactaataacagtgaacacttgctttccgtccacttcaaataaaaaggcactcgtttgatgatttaaataaacgccgtcttttacttgtatatggccattttcaccctgcttaaaaaactgctgtttgcgcgtctttttcgtcatataatatgcaccgtagccgagcgcaccaaacagtaaaacgacttgaaataaggtcgtcatatacgacatatgactcctcctctactctttatcttgcatttgactttgcgctttcataagcgccgcttgtttcttatcagcttcaatttcagaaatgataataccgaatttctcgtccattacgattgcttcaccgatgccgactttcatattacttaaatacacatctactttatgtcctaagtttttctctacttcaagaacatcgccaacttttaactgctttacatcaccaagtgtaatagatgactttccaagctttacaccaagttcaatcgaaatatctgaaacagtatcaatatgtgctttacctgcttcatttcgctttcctgcaaaatcttctaatcccattaatgacacgggagatacttcatgcttcatatggatcctcctactctacaaaacttttaaataggagcgccttacgcgttccatcttttccaataaaacaattaaatttatgctttccatctacataaccaagtaattcatccgaaactttcgtatgaagcggaattatatcgccttcttcaatttgttcaatctcactcattgtcattttctgctcaccaattgcaacgtgaacaggtttgtacacttgatttactttcatttccacttcagacatatactttttacgtttatctgaagaatgttcgacaatattttcagacgttaacttatccataatttcttcaacagataagaatggaattccgatacgcaccgtcgtattccaaaaatctgttttcatatttacgttaagtaatgaaatgatatcactcgctgtcgtaatctttaatgcattcggatctgtttctgtcgttacaaatttcggttcaatcgcaacaacactttcaaatgattgctctaaatttttacaaagaagcaagaatatattatcaagcgttaaaaactcaaacgctgttaacggtctgcgcatcgtaaagttacgcttactatctccgccaagccaacattcatgaatataaataacgaatgctaaatcaatctcaataacaatttctccaagctctggtaaaccgagatcaattacgcaatataaataataatctttcggcattttctccacatattcactcgtaaatggaacttgctcaactgttgaaggctctagttcaattggaatacgcatacgcgctgataacgtctgtgacgtctgttttccaaaagtagaagcaatcgcttgcaaactacgtaaatgctcaacaccgaacttctctggtctattaaaatcatactcttgaaatttctcttgctttcctgcttcttgtgcgaaagctggcatttcctcgccttcatttaccgccttcagcagggcatcaatttgctcttggcttaatttttcgccactcatgacaatccccttccctaccttttcaattcaacgatttcaacgtacatttttccattcttcgttaaaatctttccggttccaatctcttcattctcaagcataagacgcaccgtatttttcgttgaattttcaagacgatacaatgtacctttcgtaatatgaagcagatcttcaattttctttttcgtatttccgatttcaaaataaattgttaacggaatatcatcttgtaatttcaaatctagccaactcccatatcatgttcacgaaaatttcatgttctctctatatatgaaacttcttattttgaaacgtcgatatttaatatttttttaatatatccttgcgtttctttaaatggcggtacgcctccgtactttctcacattaccaggaccagcattgtaagaagcaagtgccaatactaagtcaccgttatttttctttaaataaccacttaactctttcacgccaccttcaatactttcagctggtgaaaagggattcttcacacccatctccttcacattcgctggcataagctgcataagtcccatcgcaccggcatgtgacaccgttttcggattaaaattagactctacttcaatcattttttgaattaacgttttcggaattccatatgtacgacttacacgatcaataatatcctcatacttcccttcattggaagaacgtattttttgaatattatacttcttcgttaatccccacgtatcagcagcctcatttttcgtttctgggaaacgtcgttcaaactctttttgcgcaacttgcacttcatctgctttcttcgtttcacccttttcttcgggcttactcgcttcatctacttttttcgtttcacccttttcttcgggcttactcgcttcatctactttattaatagattgttccggcttattaacaaccgtttctattttcgtagattgttccggctgactcatatcttctatttttgccggctgcgtagtagccttcgtctccctcgcaggttcactctgcaacttctcttgaaaacgactactaacaaatgcttgtggactacttagcttttgctgaatttgtccttttttatatgcaagcacttcttttactatatttccaactaacataatatcaccttttcggtaaacaaagataatctaatattagagtttttttttaaagtttgcaataatccttttgataatattgtaataaaaaaatgaacaaataggaaattatcatttttttatattcattaattacaattattcgttgacacgatatacaccaaggattacaattaatctcgaaattgatttttttgcatatttacgtttaacaattaacagaaaaatcaatataaaaaaatgggggttcttaacatgagaattaatacaaatattaatagcatgcgtactcaagagtacatgcgacaaaaccaagacaaaatgaacacttctatgaaccgtttatctagcggtaaatcaatcaacagtgcagctgacgatgcggctggtttagctattgctactcgtatgcgtgcaaaagaaggcggattaaatgttggggctcgtaacacacaagacgctatgtctgctttacgtactggtgacgctgcattaggttatacaacgatagaggcattaatatcgctacaataatcgaaaaaaagtcttgataaaatggtgaaatggaatccgtttgcttcaataccgaagcaatacgaggaaatacatagaatgtttgaggaacaatataaagtacctaaaccttttttaacacaagatactatggaacgaatagaaagagcgttaatgcaatcttttcacgaggaagaagaaatacatatctcatactatcgtgatggaatggtgcaagacatgtacataaatgtattacatattgaaccgatgacgaaaactatatattgtacagatgcctttggtttgaatactaagtttaagtttgatgaattggtgaatataaattaaaagaagccgcccgacaggactgaagtgcaccccaattgttagacacagcctaacaattggggtgcacttcacatatataggtggcttttgtacgacaaaaaaaagagctctgctatacagcagagcaaaagaaaaatatataaccctataaaaataatacaaattattgatactttcaaaagacgaaatttaaatttccatcacaataatagctatgtttaagtatgaaacattctaccttcactatagctatgaatattcttattttagaattccatagtatccaaatagctctttgagagatacctcaataccgaacttcttcaaagaatcttttctttgttcaaagagaagttctaaaacttttttcttatctttgtctcttccataatgaatcaacctatgacagttcggacatatactaactatatttccaacaacatctaaactattttcaaaatcatgttgcattcttaacggtattagatgatgggcctccatataattttttcggctggcttccgatacaaatgtttcatgtgtgtcatctatttcacatttaaattctgcctgtttaatagcttgtttagcttttttcggatcacgaggccatacttccctaccagattccattttagttttttttcgattttccggtttctcttcttctgcaatctttactttactaaaatccgaatcaatattagcctgatacatatcttcctcttgctcatcctcagaaagaataaagctctcattcaacgctttaataatattatcaatagatttatattttgctaattttattgaatcaatatatgaatatataaatttaaaagattaaaataaaaataagtacacatgttttattaggaggtatatgtatgtccaacagcacttcatggctagatgaaattatagcaatattaaccgaactagatggagcaggaacactgaatcaaattaaaacaaaggttatggagcgtaataaaattgacttgaatagataccaacacgaacagtctatagctgcaagaattagaaagaccatttatcaggtaaactattataaaaacgttcaatggccgctactaaaactaaatcttctaaatgagcagttttaaggttgtttatttttaaaaacatcaaaaatgccaaatcccttatatcacaaaggatttggcatttttaagtatctagaacacgcgctaaatttaaggagaaattaacagacatgagtccggtataatgccgtgtccacacccaaggatcggttacataaaatagcgtatctaacctgggaagtctattggcctttttcccttatagtaacgctctcttctactaagaccttttctttctagggcctacaattaatttaatcgctgttctttcttcattattgatagaaatctcttgaaacgctggaacaaaagctaagtcaataccacttggagcgacgaaccctcttgcaatcgcaattgctttaatcgcttgatttatagctccagccccaatcgcttgaatttccacattaccacttgttcttagtactcctgctattgcacctgcgactgaatttgggcttgattttgaagatacctttaatatattttccatgtaagttgctccctctattatttaatctctctttcgttacaattttaaatattttagcgtatctttaattactattcacaccaaaaacaaacgatgcttcatatgtatattattctatattttctgactttttcctgctcagctacgcaaataaaaaataaactgaataacctaatataaatatagctaaatattataacttcaccaaatgataacatccatacagctaaaggtaatatttctgttttgtcagactaaataaatatagtaaagtgaaattttaatgagtgggggtttaattcatcccccacctaacttctttgctttcgctgaattttgagatgggagtcttactgctcggaaaatagcgggataaacgtttcctcgttacttcaatctatttagaaattccatttatttttctatcaaattataaaccttatcatcttcaaaaggtgttacaggtaatacccaaatactacacttcatcatttgaccactttatattccaaatctatttccttttatagtacaagcatacacgccaattgtgattcatcttcataaactactatgtggtttaaatttattaagaataggaggtaatattttgggttcatactatcattcttcaaactcgtataaaaaatgctcatgcaaatcttcttccagttcaaataaaaaatgttcatgtgaccattcacataaacgaagctgtcctgcatacggaactttttggcaaactgaatttataactgttccttttggcgatccttttccatttaatcacgttggacctttagcaggaggtgtttccttactaaatcctactactatacactttagacaagctggtgattatagagtttcgttcatttccagtattaatactactttaaatcctgtatttccacatatcccagtcataactatatttttaaataacaatccacttgctaatagtcaaggtgacttcgctattcaaatgaatacttcatcaaataacgaatgtcttcaactcgttggcgaaacaattgttacagtgcctgctaattcaactcttcaacttagaaataatagtggttttaatcgtcaaagtattgtaacttgtgacaatggtataaattcagttgaattaacagttacaaaactaagttaaaattatttcttcacattcagatgctatttcagcatctttttttattgaataacagttttttcaacttttattatctctccccacataaaaaagtgcagaattctttctaacacaagatttctgcactttttattatacttatttattcttccttatttctctacataaaccgacttaacaatcgtacgattatatggttttccttctttattcatcccttttatatccatcgtaacgttgtatactcccggttgttttatatctttcaaagcacctgtaaatgtattcgtattaacattttgtaattcattaaattcagagactaacttaccttctttattaacgactcttactgttatggaaagatcccctttcatttcaggtgctacaggtgattttttcagtttatactcaggtttatttattttaacttttgtaggcattcgaagaacaaatggtgcgtcatccttgtaatcgcttacaactaaatatgcatctttcgactgcttcgccatcattttgattttccattcgcctacttccaatttatcaaacttaaatgttctaattgtcgccctattaaagaaagattcgccttcaccagtagttatagcgctatctttatttgcatagatttttccttttggagataccatttgtacttctacatcagaagaagcagttagtacagaaacgattccttcagcctttttatcaacagaaatactttgctctatccactgattttgtggtaattcgcctcctaaaatattttgatttgaagttgtatttaattgttctagatcttcatttgaactagtgctggatgctactaaagctggtaatcccacatttgtcgtacgtaaatatggttcaattcgtgcaaaaacagctgatccttttcttatattgtcatgatcaaatctggaatctgtaaataaatgtgtaccgtacgatagcttcgcactccattcatttactagtccatcatttgaaccgtacgatgataaatataacccgcccatagataatgcagaaaatgttggcccccagctagttccagtagccgtatagtaacggtttaatttagctgctgggttgttatctattattgaacgaaactttgccatttcacctatttgtaacgaatacgtaccatcatctttttgacctaatatagaagcaagccaacctgcccaccaactatatgacaaatctgctaaatttgagccgtgatgcggtgtagcaagtgtaataacatttccaacaaatcgattcgcaccatattcaactaatgcggcttgtgtatcaataccacctttactatgcgctacaatattaacttttttaccgaaataattatatatttcttcaagtttttgtgctaacaattttccgttatcccactgactagccgaacctttccctgcagcatcatacaattgtataaacactgtttgataacctgcttttaaagcataatcatacatatcatttatatcatgatatactgtctttccataccaactatcagcattaccatttcttccttgtacaaagagaattggcggtttattctcatcataattagcaggtttttggcctaaaaaccattctccaggtgtgaatacttctgtatcaggaaacccctttccaagctcttttacaacttctgcctgtacatttgtgctaatcgttggagccatgataaaaaatacaattagtaaggccacacatcttctcatcagtcgcatattactccccctatttttttgaaagaaggtgttctttataatattttatattttcccttccttaataatagctaatcttttatttttagaaggttactagttgtataccctcttccttaactctcgttattctctttgtttctacctcttccttttgatagaatacgacaaaaaagtttctcaataattgttaacttcgctacacccagatattttttaaatcattattgtttatataaagcatacaaatcttgaaaaaattttagtgaaaaaacattttattactagttagttatttaaaaatataataaagatatgtactttcttttcattaaatacaaactaattttaaaggagcttgtattataagactttcctacgattaaaaattaaactgaaatttccgaatagaaaatcatatttccagaaacatatattatgataatttccgcacacttgaattaactttttagaagtactaacctatcggtgagcagaagaaaattctgtaaaaagaaaggagaatactttatgatgaccaaattacaaaaggagttttttaaacgcttagaaattcctgcaaaagaaataacacttgatgatttagatgaaattctcttaaaaatgggaatgatcctcccctatgaaaatcttgatattatggctggtactattaaaaatatctcaaaagataacttaatagaaaagttacttattcaaaaacgaggtggactttgttatgaattaaactccctattgtattattttttaattgattgtgggtttcaagtatacaaagtagccggtactgtttatgacctttacgataataaatggaaacccgatgatggtcatgtcattatcatattaagtcatgaggataaagattatgttgtggatgcaggttatgcatctcatctccctttacatccagtcccttttaacggagaagtcatctcctctcaaacaggagaatatcgaattcgtaagcgaaatactcgaaaaggtacgcatattttagaaatgagaaaaggagctaacggggaatctacaagtttcttacaatctgaaccttcaaacgaatggaaaataggctatgctttcactgtagatccaatagatgagaaaaaagtgaataagattcaaaaagtgattgtagagcataaagaatctccttttaataaaggagctatcacttgtaaattaactacttatggtcacatatcattaacaaataaaaattatacagaaacctttaaaggcaccaaaaataaacgaccaatagaatctaaagattatgctcgcattcttcgtgactcttttggaataacgcaagagaaatatgtaggaaaaacactagaaagaggctagttgactacaagtatttcataataaagcagattctatatttagaatctgctttattttatattttgttataaattaatttaattttgttgttaccctttaattttcaattatatactcatcatcatatttatcgtattgtagccctttccctatctttgactccgtaacttgatctcttaaaaacggtgcagcatccattttactagttgcaatttcaattccatattttttcgttaaatgagctaactctattaaaaaccactctcttcgcaatgtaactggaatatccaatgtttttcttttcatatataatagcacctcttttattttcatagcttaaaaatatcactggatgcacttattaaaactacctttcaccgctaacatccaatgaaacattatagtatatgcatgtccatttcaaacgtgctatcacaaatatgacatttaagtttacataattatattatgtaatagtaggaaaggaaggcatgtcccttcctcttctactatagatttaaattaagaacatcttggtacacctaaagctaaaaataaacctgctactcccgcagtaatcggtacttttaacgtaataacatcatctaccttcgttactaaaaagtaagcattaccttcttgtaatatacaagttaccaacaattgaaattccattcaaatctcctcctttcaattgatatactataatttatgaaatctctttcaaaaagtaataggaaatatatccatttttccttatatataaaataaatgtttatgagtctattaaaaatattaattttctaaatttatacaaaacgtgtaatatccaataaattcctatataatcaataagaagaatcttacaaatagaggtatgaaaatgtcgattttaagtaatattggtgcagctttattttttattgcttttattcttttaatcttatgtatcatttcattctttaagaaaaatggaaaagcaaaacaatatggacgtcctaccgttattctttttatgatttctattatattaataacggccggtacaacaaaatcggaacaccccgtcgtcgagtttttttctactttaagtttcattctatttatattcttccttgttctagcaatcttatctgttattaagaaaacaggtgtagcgaaaaaacaatttattattacagctgtattatttgtcatttttgttgtgttattaggtatttcagctccttcttctgaaaaaacgacagcaactagtacaaaagttgcctctaataatgaagagccaaaagatagcgaacagaaaaaagagctagaaaagaaagaggcggacgaaaaaactcaaaagcaagaagatgagaagcgtctagccgaagaacaagctcgtaagcaagaggatgaaaaacgtcaggctgatgaacaagctcgtaaacaacaagaagaacaaaaacgtcaggctgatgaacaagctcgtaaacaacaagaagaacaaaaacgtcaggctgatgaacaagctcgtaaacaacaagaagaacaaaaacgtcaggctgatgaacaagctcgtaaacaacaagaagaacaaaaacgtcaggctgatgaacaagctcgtaaacaacaagaagaacaaaaacgtcaggctgatgaacaagctcgtaaacaacaagaagaacaaaaagcacagcaagctcaaacacaaccagctaatggtaatactgatagtgcatactacaaaaattgtgctgcagttagagcagctgggaaagctcctttacataaagggcaaccaggttatagctctcatcttgatcgtgatggcgatggaattgcatgtgaaaaatagtaataaaaaagaagcttttactaagcttcttttttattaacgtaaaatattaccacttattactttcccccttattttaataacattcttcttattattctcaaaaacgacacagaataagtgatttcaatcactacatagattttaatttatcgctattcttaattcagatattacattaaaattttatggaggcattcatatggaacatacatttactgaaacttcaattgttggtgagattgttacacaatttccgaaagctagtgatctttttaaatcatatagaatagatttttgttgtggcggtaataagccacttattgatgcaattcatgaaagaaatttatcagctactgaagtgcttacagagttaaatacgctttatcataatacgaaacgattaaatgaatcggaaattgattggaaaaatgcttcttatcgtgaattgattgattatgtcataaataagcatcaccgctatttaaatgaagaattaccacagttaagtccatatgtgacaaaagtattacgtgttcatggggcaagtcagcctcattttgctcaaattcatgagctatttcatgaacttagaatggaattagaacagcatttaattaaagaagaaatggaagattttccattaattttagaatttgaacaaaatccaactaatgaaaactatgctaagttacgtaaagtagtaaatgaactagaaaatgagcacaatcatgctggaaatattataaaagaacttcgtaaagtgacaaatgactttactcctccagaaggtgcttgcggtacttatcgacttgtttaccaacgcctcgaagcgctagagtctgatttatttgagcatattcatttagaaaataatattttatttccgcgtgccattacgaaagcataaatcaagtgcaggacatgagtgtaaatacttatgtcctgctttttcgtttcgcgaaaaatattcacatccccttcacataaaaccgaattttaacaatttgtgaatcattataaagatgtgataaatatcacatctcccccttatttgattttctataataaaaatataatcctttgttcaatatttcacataaaaaggggaaacgaaaatgaaaaaacgtttagttatgatcggaaatggtatggctggcattcgctgtatggaagaaatcttaaaacatgatagtgattcatatgagattactatttttggagatgaaccgcatccaaactacaaccgcattatgctctctcatgttttacaaggcaaaacaaatatacaagatatcattatgaatgaatacagttggtatgaagaaaacgaaataactttgtatacgaatgaaagagttcaaagtattaaccgagaagaaaaaattattattacagaaaagaagcatactcttacatacgacaagctcattatcgcaacaggttctagtgcttttattttacctgttgaaggttccgcactttctggtgtaacagggtttcgaactattgaagatacacaatttatgatagataccgctaaagaaaagaaaaaggccgttgtcattggtggcgggttactcggtttagaagccgcaagaggtctaattgatttaggaatggacgtacatgttgttcatttaatgcctagcttaatggagcaacaactagatacgaaagcagctgctcttctgcgtgaagatttagaagcacaaggcatgaagtttttaatggaaaagaaaactgtaaaaattcttggtacagaccatgttgagggcattcaatttgaagacggtgaagttgtagattgtgatttaatcgtaatggctgtcggaatacggccaaatacgcaaatagcaaaagatgctggtctaattgtaaatcgcggtattgtagtcaatgactatatgctaacaaatgatgagtccatttatgcagttggagaatgtgcagagcatgacggtatcgcatatggacttgttgctcctctttatgaacaaggtgcgatattagcaaaacatataacaaatttacaaactgatggatattcgggcagtatcgtcggtacacacttaaaagttgctggttgtgatttattctctgctggccaaatttatgaagatgatcaaacgaaagcaatatccatctttaatgaatgtaaacgttcctataaaaaaatattaattcgtgataataaagtcgtcggtatcgttttatacggtgatacagctgacggtacccgcctctttagcatgttaaagaaagaagaagatatacaagaatatacaccagcttccattcttcacaaagctggtgaagaatgtgaacttgacgttgctactatgagtgcggatgacacaatttgcggatgtaatggtgttacgaaaggcacaatcgttcacgccattttagaacaggagttaaagacttttgaagaagttaaagcctgtacgaaagccgcagggtcttgtggtaaatgtcgtccgcttgtagaacaagttttatctcatacacttggagatgcttttgatgcttctgcacagtctaccggtatgtgcggatgtacacctttatcacgtgatgaagtcgtagcggccattcatgagaaaggtttaaaatctccaaaagaagtacgaaacgttcttggttttgtacatgaagatggatgttcgaaatgtcgtcctgctttaaactactatttacgtatggcgattccagaagaatatgaagatgataaatcatcccgtttcgtgaatgaaagaatgaatggtaacatccagcacgatggtaccttctctgttattccacgtatgtacggaggcgttacaacagcagatgatttaatgaaaattgctgaagttgcgaaaaagtacgatgttccacttgtgaaaattacaggtgcgagccgaattggcttatacggtgttaagaaacaagatttacctaacgtatgggctgaattaaatatggcttctggatatgcgtattcaaaatctcttcgtaatgtaaaatcatgtgttggctctcgtttctgccgtttcggtacgaaagattcattaggacttggtatgttgcttgaacaatcattagaaatggtagatacacctcataaaataaagatgggtgtaacgggctgtccgcgtaactgtgcggaagtactgacgaaagattttggcgttgtttgtgtcgaaaatggataccaactttatattggcggaaatggtggtacggaagtacgcgaagctgattttgtaatgattgtccctactgaagatgatgtccttcgcatcgctacagcttacatgcaatattatcgtgaaactggtatttatggagagcgtactgcctactggacagaacgattaggcttcgatcacataaaggaaatactgcaagatgcaaatatggtcactaagttaaatgaacgtttccaaaaagctcgtggcacatataaagaagcatggggacaagcactagaaacgaaatcattaaaagcgatgtatgaagtagaaactgtgaaataaggagctgtgatctatatgatacaaacgaaagaaaaaataaaagttatgcgtgcagaagaccttcctattcaaatcggtaaagaggtacaaatgaaaggtatgtctatcgccctattccgcctttcaaatggcgatattcgagctgtagaaaatcgttgttctcataaaaacgggccattagcggaaggtattgtatctggagaattcgtcttttgtccactacataattggaaaatttcactactaacaggtgaagttcaaaaacctgatgatggttgtattcaaacgtatgaagtagaagttattgacggggatatttatatatacatgtaatttacaaaaggaagcctcccctggcttccttttaaataaaaatagacgaggtgcgaatatgaacggatatgtatatttagttggtgcaggaccaggtgatgaagggcttattacaaaaaaagcgatggagtgcttaaatcgtgcagatatcgtcttatatgaccgcttattaaacccttcctttcttaattatacaaaagaaacatgtgaacttatttattgcggaaaaatgccaaagaatcatactatgcgtcaagaaatgattaacgcacacctccttcaatttgcgaaagaaggaaaaatcgtagtccgcttaaaaggcggagatccatctatttttggccgtgttggtgaagaagcagaaactttagcatcagcaaatattccatatgaaattgtaccaggtattacatctagcatcgccgctagtatctatgcaggtattcccctcacccaccgtgactacagtaatagcgtcactttattaaccggacatgcaaaaggtcctttaaccgaccatggaaaatataattcatctcacaatagcgacacaattgcctactacatgggtatagaaaacttacctacaatttgtgaaaacttactacaagcagaaaaaaaagaagatacgccagtagcagtcattgaatggggtacaactggtaaacagcgcgttgtcacagggacactgtctaccattgtttctattgtcaaaaacgaaaatatttctaatccttctatgacaattattggtgatgtcgtttccttacgggatcagatcgcttggaaagaacgtaaaccattacacgagaaaaaagttttatttgcatctgcaacgaataaaacaagttcaatgaagcaaaagttacaagaagccggtgcagaaatatatcaaattcctactttcaaaaaggtagaatacacattaacacttgaacaaatcaatgaaatttttaacgttaatcgtcttgttttttgttcagctgaaagtgtagaaatattgatgcaatcatgtagtaaacaccaaaaagatattcgttctttacaagcgcaactacaacatatgaacgttgccactcaagaaaaacttatgcaatatgggctactaagtaaacaagcagagttctcttccaatacaacagtttatttaggacgaaacattaaccgaattgctgttattcaagaaaaaattggtgctggttcctatatgatgactcatgagtacacaattgatcatcgcttcgatgaaattcattcacgtatgctttctgaattctcatgggatagcattgtatttgaaggtcgtgcttctattgatacgtttctagcagaaataaaacgccttggctttatcaatattcttactctcccattctcgtataccgacgttccaactttatactatgcaaataaagttgggtttcataacgtagatcatcaattacaagaaactcttatgaagaaagacatggtgagacaatgaaaggaattgtatatgttggacatgggagccggctacaagaaggtaatgaacaattcattcaatttattcaatctgttatgaaagagcgaaacgaaagaattcaaaaaatagcttttctagaactaacgacacctactatttcggatgcagttacagaaacgataatagagggagtaactgaaataatgattgtacctgttttattatttgcagcagctcactacaaacgtgatgttccttttgaaatagaacaactacaaaagaaatatccacaaataacattttcagttgtacctccttttagtacacatccacatatggtggaacttgtagtgaaaagaatacgtgaagctatgccaatgcaaaatagtagtattttactcgtaggacgaggcagtagtgatacacaaccgatacatgagttacaacaaatcggagcagccatcgaacgaaaacttggtatgccagtatcctgttcctttttaacgaaaggaactccctcttttgctgttgagctcaaggatataacatcgactgcgtcccatgtatatgtcatgccataccttctctttaccggattattacttcaaaaaattgaattgcatacaaaaaaatacaatcatgttacgacttgtaactgtcttcagtttgatacatatatgaaactaacattgttagaacgaatggaggaatgcatatatgtataacatgtaccctcttatgtttaatctacaaaataaagtggttgttatcattggtggaggtaaaattgcatatcgaaaagcgtctggattaaaagatacaggcgctttcgtcactgttgtcagcccagaaatttgcgaggaaatgaaggaactttcttatattacttggaagcaaaaagcttttagtaatgatgatattaaagatgctcaccttatttatgcagctacaaatcaacacgctgtaaatatgatggtcaaacaggccgctcatgatttccagtgggttaacgttgtaagtgatggtacagaatcatcttttcacacacctggcgttataagaaataatgaatatgttgtcactatttcaacttctggtaaagatccatcatttacgaagcgtttgaagcaagaactaacatctatattgcctaaacttataaaaaagatttctcgtacacataaattgtaatctatttcttagttaaaatagtaattacctttggacaaacgttttttaggggacgtttgttctttttgttgtagttccgttcttttatttcacaagcaatctatgaagaaaataaatggtgtttgcaacttgtaaacaaataaatttcatgacaagtgtaacattacgagcaactctttctattcagtttttatattggatattcattcaaccaaattagcgcttgttcataatcatcaaaaaactccacggattcttttgtattggattgttgcaaatacttcagtatctctccttcttcaagaagaaatgcaattgccttactatgattcaaaatggtttcattgaagaacttatctttccatactttttgaacagaaaaatgatttggggtatacccttttctatccaccaacaatttgtatttccgaccctcagaaataaattgctgacaaacctgctcaaaatcattaaaccattcatacacatcctctgtattaatctggccaattagatgggtaacaatcaaatctcctgaaactattgtgctgatattctgtttactcaacttttaatcatctcccttagtggcaattatgcataaaattcttacttgacactcccaccccatcgctatcaccctaagctcatataactttaattataagcgagattgtgtcttttttcgcaagtctatatgtaaatactttaaagatttccttaactaatctgccctttaattgaataacttttgacatcttcattttaaaagcacattcttatagaaaataagcgtttattgagagatcaataaaaacatgttgaagcctattactaaaagaaccatcccaaaatactttgggatggttctttttccttattaatgattctttaacatcactaacagcttttcttgactatacatccacactgtaatgattaaacaagcaagtgcgacttctgataatgccataaatccaattgcataatggcctgttagttggaatagtaatgttaaaattaggggcgggaagaaccctcctagtccacctaaagctgaaacgagtccatttacaatacctgcttgttctgagaagtacattggaacgagtttaaagattgtaccattaccaatgcctgcacaaaatgcgactagtaagcaaccaaatgtatacacgttcatactaggcatgaatgataaaataatacctgaaagtgttaaaccgataaatacgaagattaatattttaaatggattaaacttatcgccgagccaaccaccaatcggacgcataattgttgcgagtacgatgaatcctgcagttcgcataccagcatctactttctctaatccgaagtgagatactaaaaagtttggtaagtatactgtaaatgcgacaaatgatccgaatgttaaaaagtaaaagatacataaaaaccaaagtttctcatttttatatacaccttttatttgttccattaatggtgtattcacctttttctccttacgatcacctaataaaaagttcataagtgcaaatgctgcaagtaaaactaaataacattgtactgtcgttctccagccaactgaagttgcgataacaggcgctaaaaatgaagtaattgctgttccggcgttaccgacaccgtaaataccatttacaaaaccatgactctctttcggaaagtattttggtaaagaagttactcctacagagaatacagcaccaccgattcctacaaataatccaccaataattaaatccatcatagaattggcaacactaatataaaagacaggaagtaataatagaataaaactaataaagaataattttcttgctccgaaacgatttgtccaataaccaattggaatgcgaagaacagaacctaaaataacgggtactgctgtgaccatagaaatttgccccgcagttaatgggatatccactttaatataaggcattaatgatgataaaatgacccataccataaaacctataattagattagaagtttgtaaacttaattgaaaattaggacttttcatcctgttccctcctatgtatgcatagttatattcattctctccagcctaatcacgtcgtaacatgattaggtcgaaaagaatcaaccaccacttactggcggaatcatcgccacagtatcaccagtttgaatgacgtcattctcatttgcatactcttcatttatagctaccatgatttcatttgaaatcgctacgttgtatttcttaatgagtaccttctttagttcagcaactgtaatattttcacaatcgatttgtaatgctggcttacttacttcttcttgtaaatgtgcaaataatagtacttcaatcatattctcatctcctcttcaggttcaccatcttcccaaaattctttcttccaaattggaacgatttgttttatacgctccataatatattcgttcgcctcatatgcagctttccggtgtggtgtagaaacagcgacgacaacagcaagatcagaaatttgtaatgtaccaatgcgatgtgtaatggcgacaaatgtcccaggccacctctctcctaattcagtaccaattctctcaagttgtttttctgccattgttttatatgctacatactctaaatgtagcgtacgacgccctttcgtaaattctctaacagtaccaacgaaagtagtaactgcgccacactcacgacgaattactttgtttgtaacttcctcaattgaaataggtgtatcaattacttcataatacgtttgtatcattttgcacctcttatctttgtataagttagtaatctatttttctattatttgtatgatcgaagtggttcttcccacggccactcacttccagcgtttgattctaataacagtacggaaacagttattcctgcttcaaatcctctcgttcctcctggcaggacgataaatgcgttcgcctctgcaagtgaagaaattgcactagatttatctaaaccaactggtatagcttgcaattgactatctacaaattccactctccctcttacaaaacgagtaaacggatttgctttcgaaaagtctttttgtaaaattgcttctgcacgataaatgtgtggatctttcctatgcaaatatgttccaatgactggtcgaacatataactcacatccgacataacaagcagaaggattaccagataaaccaaatagtagttttccttctacctcagctacagttgtcacacttcctggtcgcatcgctattttgttaaaaagtacattagcttgtaacctcttatgaatagcaggtaaatagtcataatctcctaccgaaacgccaccagttgtaattaaaatatcgacttctttcatcgctttttttacagtgttataacacgtctctaaatcgtcagcgaattgcccataatactgtacaactccgccggctcgttcaatttgagcagcaatcatataagagttactatttcgaatcttccctagctttaattgttcatgtacttcaagcagttcgcttcctgttgttacaattccaataaccggctgttttataacatgtacggaactataaccaaacgtagcaagaagcgctgctactccaggattaataacagtcccttttttcacaaggatgctattttggtttacatcttctcctttaaaagaaatgttatcgctagaagagaaagagcgttttaataccatataaatcttttcattttcttcaaatccttccgttagctctaacataacaaccacattacacccttccggaattgcggcacctgtcataatacggacagcttgaaattctttcacttcttctgtaaaaacaaagcctgctccaatttcgccaattacttcaaattgaatggggttactactactcgcttcttttgtatcttccgctcgaatcgcaaacccgtcgtacggagagcgatcaaaatgcggaacatcatgatctgcaataacatcttctccaagtgttctaccgtagctttctataagagaaaccttttccatttcaccttggtaggcatatttcattacacgagcaactgcttctgctactggaattggtatacgtttatctaacattctttttcacctcattttaataaggaaaaaacgatttttctgttcatcctatatatttggcgtataatcgttttgctattttcacatcatttgtcccatgaataaatgccctaccgtctataaataaaacaaaacgatattcatcaactagaaatgatagtaagtaaggcgtttttttgacatgtacacttttttgtaatcgtttttgaatttcggttaaattaagatttctctttattcctgaacggatttgaactgtattccgtccgcataacacttccgttttcatttgcgcttcaaatattaagcttggatacgttcgtgatttcccacaagaaggacatgtacttttcttctgtctatttacttttaatgagagatattgattgttccaaatatcaaatgacaacatcgtccctcttaatgattcataatcacccaccaatattttcatcgcctctgtaacttggtgagcaacgaccatttgtacagctggctgaatgattccggctgtatcgcatgttgcaccgcccataggatgatccattagacagcgaaaacatggtgttttcccaggaagaattgtatacgttacaccgtaactcccaatacatccgccatatatccaaggtatattttctttttgtgaaatgtcatttataagtagacgcgtatcgaaattgtcagtcgcatctaatatgagatccacatcttttgttaactcttctatttctcgcattgtgacatctgttacaactggtacaatttccacttcagaattaatctttcttacatgttctgctgctgcaattgcttttggtttacactgctgcgcatcttcttctgtatataactgctgccgctgtaaattactccattcgacgtagtcacgatcagcaattgtcaatttcccaattcccatcctagcaagtgcttctgcattcgcagctcctagcgcacccgcaccgattaggagcacatgcttttctcttatttttctttgtcccatttcaccaattccagaaaacaacacttgtcttgaataacgctcttgcataagaaatcctcctttcactatccaccaatgtaagacatttcaacttttggacgtttacttgtattctcaactgttctttcatctgaatatcgatctgttctatatcgccatgtatcatttaaaatttttaatagtgatgcatcagaaatattttctcgaagaagcgttcgcaaatccgttcctttcgctccaaataggcatgtgaaaaacttgccgtctgccgaaatacgagctctcgtacaagaaaaacaaaatgactcagaaacagaagtaataaatccaacttctgcattactccctacatatcgatacaatttcgcaacctctccaaaataacgaggctgagcgggctcaattggatatacacgattaattttctctattaattgttccttcgtaatgacttcttcaaaattccatccgtttgtactgcctacatccataaactcaatgaaacggagctgaatttctttttctttaaaataacgagccatatgaagaatttgactatcattcatccctttttttacgaccatatttacctttacttctaatccagcagcatttgctgcttctattcctttcagtacaggttttgtacttacatttcttccgttaatttttttgaagacatggtcctctatcgcatctaaactaatatttacacgttttaatcccgcgtcttttagcgccttagcttgttttgctaaatgaattccgtttgttgtgagtccaatatcttttaagccttctagatttgtaagtcttgcaattaacttcggtaagtctttacgcaataaaggttcaccgccagtaagcctaattttattaactcccatacttataaataatctcgctaacctttctatttcattaaatgttaataaacactcttcctgtaaaaaagcataatcaggtccgaacacttcagcaggcatacaatatgtgcacctaaaattacaacgatcaataactgaaatgcgtaaatcttgaagtggccgctttaaagaatctttcatattctcgtgcatctctatcccttcttttctgctgcaatccttagtaagctttcatttttttatttgccttcattataaaaaagaagctacatattcaatgtgacttttctcacatcactttccccattcaaaaaattttcacaaatccgttcgcattttgttcacatctttagccactcctccttacggtcattgaaatttcaatttatttttaaatagctcttgcattttcatcatacttacactcaaaataggaaatgtattgcttataagaagaaaggtgatcactgtggcaaacagtatgacattatctcaagatttaaaagaattacttgcatctgttgaatataaaatgcagataaaaaaaggtagttttatttttcaagaaggtatggaggcaacagaactctatatcattcactcagggaaagtacaaattagtaaacttagtgctgacggacaagaattaacacttcgaatttgttcggaatatgacattattggagaattaacattgttcacggataatgcaaaatatttattaaactcaaaatgtcttgaagatgttgaagtaggtgtaataaaacgtgaagcgttagaaaaagcattactccaaaaacccgctcttgtatttgaatttatgaaatggattagtgaacatttaagaagaatgcaaacgaagttccgagatttagtattacacggcaaaaaaggtgccctgtactctactcttatacgaatgacaaatagttacggtgtattaaaagaaaatggtattctcatcgatttaccattaacgaatcaagaactcgctaatttctgtgcaacttcacgtgaaagtgtaaatcgaatgttaaatgaattaaaaaagcaaggtacaatttcaattcataaaggaaagattacaatccacgatttacaatttttaaaatgtgaaattgcttgtgaagattgctctgcttctgtttgtagcattgattagcatcttatttagatgctaatcttttttcaatttaaactacttattaacgtttattgcctatgtaaacaaaaacgaggccttccatattagacctcgtttcgttttaaccattagctcctatccgtttacagcagtattattttttcaactcattaggaatacgtcttctgtaaatcacataactacggcttacatatttaattggggcactaaatacatgtacaagtcttgtaaatggccacactgcgaaaagccccatccctgcgagaatgtgaattttaaaccatattggtacttccatcatatattcaactttcggttggaaaataaagagacttcggaaccaagggccaatcgttgtacgataatcaaatccttttgaatcgatatttaaaaatgttgaagaaagtcctgctagcattacgataagtaataaaataagcgcaatataatctccctttgtactcgttgcaatgatacgttttacagttacgcggcggtacgttaatataattaaaccgataatagaagcaacacctgccggaagcccgaaactaattgctactacatggtacacatgctcagaaatacctactgaacggtatacagcttctggaattaaaatccccataacatgaccgccaattacgaacatgatcccaaagtgaaataatagacttccgagtcggagcattttcttttctaatagttcactagattttgatgtccatccaaattgatcatagttgtatctaaaaatatgtccaccgataaagattgcaaaaatgatatagggaaacaatacccaaagaaattgatccatcattttgacaacgctcctttctaatttgtctgtacaccccatgtttcgatagcgagtagcacagacgcaagaattggttcatacatactacccgcttcttttaattgaacgtgtaatgcttgtatattttccgtgtatttactcataattggttcactgtcttgctcatttgcatttgcaaaaaactcaagtaaaagtggtaaatagtcaggtagttctttatctgttacgctaaaacctgattttttataatgttgttttaactctagtaattcaatacctctttctctttgttcaccagtgttcatataagtaagatacatatttgttttcttaccaaaatcaaatgtatatacgtaactatcaatgagttgatcattcgttttatctagcacttgctttataaaggctgtaagtgaagctttaacgtcttcctgttctattgttttaacctcttcttgcaattcagttaaagcttctctccaccctagttcaggataggagagaagaaaagaagaacaagaaaaagctgtttgtaaactttgtctcataattttctgccccctttatttaagaaattgtcatacaagagcctggaccacctgtgaatgataaaccacagcttccttgttcgctatataaatctgccacttgttcacggtgagatgtcgggataacgaagcgatctttatatttcgcgatggcaagaagacgatacatatcttctacatcctgtttcgttaaaccaagttcttttaatacagcttcatttggctctttattaatttgcagtgctctcatatgtgttcgcataacagccatttttttcaatgtaagacgaatgtgtgattcatcccctgcagtgagtaaattcgctaaatattgaattggaatacgcatattatcaattgcagggaaaacctcttctgcttgccagttactacctttcccttccaccatgttcataattgggctaagcggagggatataccaaaccatcggcattgtacgatactccgggtgaagaggcagagcaattttccaatcgataatcattttatagataggtgactgttgtgctgctttaatccattcttcaggaatgccttgttttttcgcttcagctgctatttctggatcatttggatctaggaaaacagtaagctgagattcatataaatctttttcgtcttcaacagaagctgcttcttttactttgtcagcgtcatatagcattactccaatatatctgatacgtcctacacatgtttctgaacaaattgttggcataccagcttcaatacgtgggaagcacattgtacatttttcagctttattcgtttgccagttaaaatacacttttttatatggacaagatgatacgcagaatctccatgcgcgacatgcattttgatctacaagaacaattccatcttcttcacgcttatacatcgcaccagatggacaagatgatacgcaagatggattcatacaatgttcacatatgcgtggtaaatacatcataaagacgttttcaaaatctgttttaatttcttcttccattttctttacgtttggatcttgcaatccagttatatgtccgcctgctaagtcatcttcccagtttggaccccattcaattttgtcgataaattcgcctgtaattgctgatttcggacgagcaactggctgatgcttacgctgcggactatttgttaacgtttcataatcatagttccaaggttcaaagtaatcatcaatcgttggttgatctggattgtagaaaatattcataagacgtttcattttcgaaccggattttagctgaatttcaccatttttcaattcccagccgcctttatatttctcctgatcttcccattgtttcggataaccaatacctggtttcgtttctacgttattgaaatacatatattcagcacctggacgatttgtccaggtgtttttgcatgttacgctacaagtatgacagccgatgcatttatctaggttcattaccattccgacttgtgctttaatcttcaagccaatctacctccttcagtttgcgaattacaacgtttaagtcgcgctggttcccagttggaccataatagttaaatccataacttaattgaccatatccaccaatcatatgtgtcggttttacgtgaattcgagttggactattatgcgttcccccgcgattacttgttaatttcgtaccaggtacgttaatgtgacgatcttgcgcatgatgcataaatgccattcctctcggtatacggtgcgttacaacagcacgcgctacaacaacaccgttacgattaaagcactcaatccaatcattatctgcaacacccgcttcagcagcgtcctctttattcatccaaacagttggaccacctctaaatagcgttaacatcggtaatgaatcgaagtacatactatgaatcgaccacttattatgcggtgttaaatagtttaatgtaatttctttcccttctacttcaggtcgtgatttacggaacggtttatgttgcagaattggtttaaatgttgccatcgtttcaccaaattctttcatcatgtcatggtctaagtagaaagattgtcgaccagttatcgttctccaaggaatgagacgttccacatttgttgtaaacggtgagtaacgtcgtccacctttttctgaacctgtaaaggccggagaagtaattactgttttcggttgtgctgtaatttgttcgaatgtaaagcattcttcttcacgttcttctgctaaatcacgtagttttaaatctgtttgtttttcaagtgcttcccatgcttttactgccatatgaccgtttgttgtagaagatagtgttaataccgcttcagcagcattgattgcttctttgatgtctggacaacctttcgcgatagaatccgttcgaacgactcctaatttgctctttaattgctcatactctttttctgctgaccaagagatccctttcgtaccaatcggttgttttccggcatttggtccaagcgcagtcattttgtcataaatcgttttataatccctttcaacaacgtgaatttgtggcatcgtcttacccgggattggttcacattcacctttactccaatctttaatcttgccaagtggttgcgctaattcttgcggtgtatcatgaagaagtggtgttgcaacaacttctttcattggttcaagatcaattttcttcgctaaatctgacacagctttagaaagtgaagtgaaaatatcccagtcagagcgcgcttcccacggtgaaccgattgccggattaaatggatgtacaaatggatgcatatctgtactgcttaaatcgtgtttttcgtaccaagttgaagcaggtaagacgatatcagaatacagtgctgttccagccatacggaaatctaaattaatgagtaaatcaagctttccttctggcgcttcttcatgccactttatttcttctggtcgtaatgaatcactgtcgtcattcattaacccgtttgttgtacctaataaatgttttaagaaatattcatgtcctttaccagaactcgaaattaaattcgcacgccatacgaataagtttcgcgggaagttgtttgtgttatctggatcttcaatcgcaaacttcagttctttttcttttaatttttgtgcaacatattttccgatttcttcttgcgttgttgcaccagcagcaacagcctctttatataattcaattccatttttctcgaatgttggataagaaggtaaccagccaagtcgtgcagctaatacgttgtaatcaccgtgatgttgataacgagagttaccttcaactggtgacgctaaatgtccaacaggtgtatcttcataacgccattgatctgttacgaaatagaagaaggatgtaccgttttgtaatttcggtggaccttgccaatcttttgccatcgcgattgtttgccatccttctgctggtcttaatttttcttgaccaacataatgagcccaaccaccgccgtttacaccttgtgctccaacgagaagaacaagatttaaaacggcgcgataaatcgtatcagagttaaaccaatggttaatacccgctccgacaattatcattgagcgaccattcgtatcaacagcattttgtgcgaactcacgagcaatttgaataataagctcacgttttactcctgtcattttctcttgccatgcaggtgtaaacggtatatcatcattgaagtctttcggttcttgtccgccaagccctcggttcacaccgtaatttgctaacgttaagtcgtatacagttgtaacgaacatttcgccctcttctgtcataacctttttcactggaatcgtacgttctaatactttgtttccatcatcagagaagtacggaatttgtacagttccaatcgcttcttccattccaagtaaagaaagacgtggatcaatcttttcacctgtttcttcatcttctaaacgcaagttccatttcttttcattatcccaacgtgaccccattgtgccgtgaggtgttgcaaaatcattcgtattctcgttccaaagaacaggtttccattcccctaacttcgtttctcgtccaatatcagaagcatttaagaaccgatcagcaacgaattgatctcctttttgtttcaatgtgacaaagaaaggaaaatcagtatattgcttcgcatactttgtgaaatattccacttgattatctacgtaaaattcttgtaagattacgtgccccattgccatcgcaagtgcaccgtctgtaccttgtttcacactaatccaatcatccgcaaactttgttgattcagcgaaatcaggactgacagaaacaactttcgttcctttatatcgaacctctgctaaaaagtgtgcatctggtgttctcgtcattggtacatttgaaccccatgtcataatgtaaccagagttataccagtcactactttctggtacatctgtttgatcaccccaaatttgaggagaagctggtggtaaatccgcataccaatcatagaagctaagcatcggtccacccataagttgcataaagcgactaccagcagcatgacttagcatcgacatagctggaattggtgaaaagccaacatttcggtctggaccgtatttcattactgtgtacagtaatgaagctgaaacgagttgtaatacttcatcccaattcgcacgaatgaatccccctttaccacgcgcctgcttatacgtacgtgccttttcacggttttccacaatgcttttccaagcctctaatggtgactcgttattttgcaattcttcttgccacatattccaaagaacaccacgtacatacgggtatttcacacgaagtggactataaatgtaccaagaaaaacttgctccacgtgggcatcctcgcggttcaaaatctggcatatcaggacctgtagtcggatagttaagctcctgcccttcccaagttacaattccatctttcacatatatattccagctacatgaaccagtacagttcacgccgtgtgtagaacgaattactttatcatgctgccaacgctttctgtacacattttcccattcgcgatcttcatatgtttcttgtgtatgattatcgttataacgatctattggtgaaaaatattttaaacgtctcattagtgctgaagtttttttcttcatactgttcactcctcgtatagtatgtttaaacttaatttttttactttcatgagagacctgtaaaaaaaacggtatgttaatcgcgttagcggtgattatcgtattagtaattggcccgttcgtatggaaagcaattcaaggtggctatgatacaatcctagctcgattcacaaaagcatcaagcaatgcagatgtagattcttggaacaaaaaataaatgtaaaaataaacgaggggctactctaaaagggggtcccttttttacacagcattttttatgaaattaagaggggagtaaagaaaatgggtctgtatattgtgggattattactaagttacatgttcctaaatgtatttactgatttgaaatatagaaaaacgaagaatatgtggcatctactatttttaatattggggataggaatcacgtaccttgccggaacaagaacagggaaagagattgcaattgtactagtcatggccttagtgtgtggtttattgctagagacatttaaattttcttcacccggtgataccaaaatgcttgtggtggtaggtttatatgttagcaatgtagtagaagaatcggctatgcttaccgcaattacattaacagcttttcatttactattcttttggattgctagtgtgtatcgattaattaaaattttagggtttgcgggagcgattaaagaccaattggagcatgctgcttctatatttggggcaaaactaccaaagaaagaaatacagctaatacagagctttccaggggcttgttctattttattaggagcaattatgtatgttgctttcactatttatcaaaacggaggtatgttagcttgaatagtagaatcattcatcaaagagaaacgtatatttatttcacgatattcgcactagtaggggtacttattgcaaatatgtttattaatatggtgtttatactagcgtatccgttacttatcggattaattgtacaggttgttctgcttcagaagataaaaaaacctttttatcggagcggaaaagaattaacggaacagttaaaactaaaaaatatatttctagtagaatcaaacattttaggagacgaagaaggaactgtctatgaggtgcatcaaatgcctttttcattttctaatggattaattaataaagataagagttataaagtcataaaacaagagtatgatagaaaagtcaaagaggatttaacgaaaattgcaaaatggcaagttacaacaaaagctagacttgttacgacaacacattttcgtttatatacaatttggcagaaaaatagtaccggttatcaattgaaaaaaatagaagagtgtattgacccatatgccaagatgaatcttatacaatggatgattgcttcattctgtacgactggacgtttaaagtatgataagaagcctaaagagtgggaaagttacgaatggatcgccttaaaataaaaaggcaaaagtattctgtaaaattaaggctaagtgaatgtgcttttttatatacagagtaattgtttgtctttaatgtcacacattgaatatatattaagtacatcacttttaggtatagtgatgtactttttgatttttaaaacctttaaatgaatccatttacaaccaacatagtaaaactcataagcaaaaaaagaatagcaaaaacaatacatttaaacgttcaatttcctacgaggatattgaatttcataaaataaaactaaaccgtaatcttgataacctgagaaggaaatatatgaaattaactaaagaagaacttgtcaaaagactaattcttgcagaagaatatattgcagaaaataacactaaatgggtttcgaattactttgaatcatttaagtaggtgatgtacataaaggcatcatctacttttattaggggtcctactacattgctatcaagctaagtttttaaggtaccccctaaaagataattttgtgcccaattaatccacttaatggatattacattgtttgagatgttgcataatccttataacaaggattcttttttattatatttaagcaaaagagaactcttaaattaaaattagaatattagaagaccttcgaaagagtgctttatctacttctgaataaaacactgatttgaattatatttctcaataaacaagatatataaatggcataaaataaactttatgagatatatttagaggtcaccacgctattttgaggatttttacgtttagacaaaagtggacctttatgatggatgttaagagctatattttccaaaaaactatatttatatgttgaaaggaggattagagctgaaaattataatctacgctactttaaaaaatgtttttagtaatgatttttattcatataactaggaggagtaatatgaaattaatatcaaaaatagtaatgaccgcgttaattgtattgagtacatttgcattcaacttaggtggagaattagataagagttttctttctatcccaaaagcatatggggatgtaatcaaggcacttccacaaaatgcgtcaaagatagagttagattatgctcctgtgtatgattacgacacagacgggtgctatgcgactgcagcaatttctccagatggcacgactaaccctggcctaagtttgggcggttccccggaaagtgtctgtagagatgttaaccgactggaaaattcaaacacttattctcgggccaaatcaaataatggttggactgccattatgtatgcgagttactttgaaaaagatcaatcaacttcgggccctgctgcgtctggacatcgacatgactgggaacacacaatagtttggattaaagatggtcaggttcaatatgtaacttattcagcacatggtaactggtacactaagcctcgctcagacgttaaattcagtggaagccacccgaaaattgtataccataaggacggcctctcgacacatgcttttcgcctggctaatagcaatgacgagccgccagaaaactataaacaccagtggctccatttaccaatggttggttggaatggctatccaagcctagctattcgagaaaaactaatgactacgaactttggatctgcaacacttgagatcaaagatggaagatttgaagaagcccttgatagcgcaaagccatccaatgccaatgactttaacccttacgcaccggaactggaagatggcggtgcttatcaaatagtttctactttaaataatagtagtgttgttgacttaaatcaagcagatggaaatgttctgttgtggcaaaatcgcaacgctaataatcaaaaatggaagctagtatatgattcaaataaaaatgcatatcaatttaaaagtgtaacaaatgaaaatttagtattagcttggaatgatcttaatggttccaataatgtagttgctacatctaatcaaaataaggaagagcaatattggataccaacagaagcaggaaatggatattattatgtaaggaataagaaggatcaaaacaaagtgttagatgtaagtggttatggtactgcaaatggaacaaatgttacagtatataatttccatggtgataataatcaaacattcaaattgtctaatgtaacaggaactttaacaagagaagtggagtcactctataaggcacagcctggtcaaagcagtagatcaagtaataatttttcacttgaacatcttacggcaggtaccaaagtacgagttgttttagaaggagcaggtgctacctctttatcatttaacatttcaagagataaatcaggtgcagactctagaatttggtcagctgttagagatggttctattctaacgatcccttcaggagataatagaaagaatttgtatatctcaggtcctcctagcggatatacttctaacggtacatttaaagtgaaattctacgctcttccaaactaaaaaatattataaagtttctattccttttatattaatctaattagaaaatgagtatgcatacttcaaaaatttatttcggcttgctcgattggattaactatattaataggaaatatagtgttctgttgcaaagttttgttaagagataaaaaggtgaggttaagtacagctaaaaaccgaagtctgagccatgacttcggtttcttttatataagcctagtgaaaggatagctgttctggaccgcagccacatttcctaataatgaatttttgtatttttaatcattaattgtccatcccttgaaaagggagaattagaaaaacatagtgtacaaaaacctgataaataaggattttacttttaatatatattttaaaacatataccattgtattgacgtgtttcaaatattattaagttgtatttttgaaaggaacattctctaaagaagaaattttacaatggtttaataaagtggtagctgttttaggatcggcccttaactatgaaaaggaattatgggtaaaacaactaaattaaaaaatgtgagtaaattaaactgctgactaatctcactttttatgtactaagtaagtagtgcaagtggattacgaatcgtaaaaatgctcataaaaagattgcatttatttaacttgaaatgatcaaggagatagtgaatagtatgtaatattttaaaatgacagataatcatactaatactcaaactggaggataagaaggatatttaggaatacatacaaaaaggccttatttttatatacaggccttttttgaatgacaaatgagatatgactcaatatctcatgtaggacactttaattatacattacttcaagaatttagaaaagaatcttcaacaaaagctagactaattacgacaacacattttcgtttatataccattttgcagaaaaatagtacaggctatcaattgaaaaaatagaggattgtgttagtccgtatgcctaaatgaagaaatcaaaagagtaggcaagctatgaatggattgtactaaaataagagaccattatatggtctcttattttatatagttgttttgcatggtttgtatagatttatagatattatcgaaattttctacttgttctagaccaaggtttgactttttatgtccatcaagaaattccattacattcttttgataaatttctatatttataggtgttgttgaattttttaagaatgtttttggtagcaagggcatatgagatgatttaaatgttagctcacttttaattaaataactttcatatagctcacgaacagtttaaatttggtcaaacttgaacttttcatttttgttaaaaaggaagtaaattggttcctttttgttaaggttgttattaatggcacttagaatactagataattctttcttatactcaagagtatctttatcatcatctttattagagcgggtaatcatagtacaacaatcaaaaaaccttaaagtattaataagtaaaatgccacttaaatccttaattacaggaactaaactatattcttctttctttgctttataatattaagcaactgactacgtagcaggagttgtagaaagaagctgatacggaagattatgaagagagaaagttttagtggaatttaagcaacagctgattaactgttagtattttgctttgtaaaaaaaattcaataatttatcgttgcaaccgcttcctttttgtgtataatgaaggtaagttaataattaaaaggattgttactgttcagcaggcaaaacctaaattgatctagaggctacgggtgtagtgtggcttttggaatcagtttaggtttttttattaccttttgtgactttaagaagaaggtggaacaatatgagaatccataaaatcttaaataacaatgttgtttgtacgatgaaggataatgagacagaagttgtacttatgggcagaggtttgggatttcagaaaaaagtaggcgatgcgattgatgaatctaagatagaaaaaacctttgtgctagaaacaagagaattatcagagaaactcgctaagttgctaactgaaattcctgtagaaaatttagagattacagagagaattattcagtttgctaagacagttttgccgggggatttaagtgattatatttatcttacattaacggatcacttaagtttcgccttaactcggcataaagaaggaatgaatctcaaaaatactctgctttgggagataaagaggttctatcagaaagagtttgaaattggtctacaagctttgaacatcattgaagaagagactgggcttagactttctgaagatgaggcagggtcaattgcactgcatttcgttaatgcacagcaaggagagccggcaatgcaacaaacggtaacgatgacgaaaatcgtccaagatattttaaatgttgtaaagtaccactataagatgaacttagatgagaattcatttaattatagtcggtttgtaacgcatttgcgatattttgctcagcgtttaatgcagaaggaattgagctcggccgatgatgattttttatacgagcaagtgaaaaataagtacgaagaggcgtattgttgtacagaaaaaattgaagcatacttacaaaaagcacataatagtcatctttcaaaagatgaaaaggtgtatttgacgttgcacattcatcgtgtaacgaaacgcaatgaattatgtaattgaataaacgggattgttactgtttagcaggcaaaacctaaattgacttgtaatggagtgattcgtatgtatcgcaccgttatggttaatttaggttttttctttttataaaaatgataaatgagatgattgtaggggggagaaattattatgaagtatgaaaaattggcaaaagacatactgaaacatgttggtgggagagaaaatatagatagcgttatacattgtataactcgcttacgatttcagttgaaagatgaggggaaagctaatacagaagtactgaaaagtatggaagatgttgtgactgttatgaaaagcggcggacaatatcaagttgtaattggtaaccatgtatccgacgtgtataaagcggttattgctgtcggaggatttcaagaaacagaggaagaaagtgcgagtgagaagaaaaagagtagtctaatagatattctctctagcattttcactcctattttaggggtgttagctgcaacagggatgattaaaggatttaatgcactatttgtagcgttaggctggttaagtacacagtcaggaacgtatcaaatattaaatgcagttggcgattcgttattttatttcttcccgatcttcttaggatatacagcaagtaagaaattcggaggatcaccattcatcggtatggcaattggtggagcattagtctatccggctctatccggtataacagcaagtgagccattatatacgttatttgcagggactatgtttgaatcaccaattcatattacgtttttaggaataccagttattttaatgaactatgcatcatctgttattccaattatcctcgcttcttattttggagcgaaagtagaaaagtctttaaagaaagtcattccggatgttgtgaaaacatttgtactaccattcttaacgttactaatcgttgtaccagttacatttctcgttattggtccaattgcgacgtgggcagggcagttcttaggacaggcgacgctttggctttataattcaagcccattagttgcgggtgctttactcggtgctttctggcaagtgcttgtcatattcggccttcattggggcgttgttccgattggctataacaatttagcagtacacggtattgatccgatactagcgcttatatttgctgcttcatttgctcaaattggtgctgtacttggcgtttggatgaaaacgaaagatcagaaattaaaaacacttagtattccggcttttatttcaggtattttcggtgttacagagccggcgatttatggtattacacttcctcttaaaaagccgtttattatgagttgtattgctgggggagttggcggcgcaatacttggcgtatttggtacacaaagttatatgacgggtgggcttggcatatttacgcttccgacatttattagtccggaagatgggattacagctggattttggggagcaattgtttcgatggttgtttctttaatagtaggttttattctgacttacttatttggttttacaaaaaagcaaatatctacagaaacagatggaacaattgataaagttgctgcatcaaacgatgatgaagtaatctttagtccttttcatggtgtagttatgccacttcaaaacattgatgatgctgcatttgcatcaggtgcgttaggtgaaggcattgcgattgagccttcggaaggaaagttattttcaccactatcaggtacaatttctgcgctgttcccgacgaatcatgcagtaggaattacgggggattcaggtgctgaaattttaatccatattgggatggatactgtgaaattaaatggcgagtttttctcctctcatattgaacaaggagcgagagtagaaaaagggcaattacttattgaatttaatatagttgaaattcaaaaggcgggttatattgtgacgacaccagttgttgttacaaattatgataaatatagtatgaaaaaaactgaagtagaaaagattcaagcaggagattctttactagagctaggaattaaatagtagttacatttcattatgtttcacacgaagaaaggcattctttgagaatcgtaatacctttcctcgttaaatcttatataaaggagtttttctatatgtctaaagttatttttcctaaaggatttttatgggggggagcgattgctgccaatcaagttgaaggcgcatatgtagaagacggaaaaggattaacgacggttgatctattaccaactggtgaaaaccgctgggatattatgaaaggaaatattcattccttcacaccagtagaaggagagttttatccatcacacgaagcaattgatttttatcatcgttataaagcagatattgctctttttgcagaaatgggatttaaagcgttacgtgtatcgattgcgtggacgcgtattttcccaaatggtaatgatgaaaagccaaatgaagcaggattacagttttatgataacgtatttgatgaactgttgaagcatggcattgaaccagttgttacgatggctcactttgatgtgcctgttcatttagtagaaaagtatggaagctggagaagtagaaagcttgtaaaattcttcgagacgtacgcaaaaacgatttttaatagatataaagataaagtgaaatattggatgacgtttaatgaaattaatatgcttttacatttacctttcatgggagcaggtctagcatttaaagaagatgataataaaaaacaaattcagtatcaagcagctcatcaccaacttgtcgcaagtgcgttagctgtaaaagcttgtcatgaaatcattccagatgcaaaaattggttgtatgctcgcagctggtgcaacgtatccatatacatgtaatccagacgatgttcttcgtgcgatggaacaagaccgtgaatcattcttcttcattgatgtacaagcaagaggagcatatcctggatacgcaaaacgcttctttaaagataataatttaacaattgaaatggaaaaagaagatgaagaaattttaaaagagtatactgttgattatattggatttagttattatgcaagtagagcaacaagtacagattcagaagtgttaaaaagcataacgagcgggaatgtattcggttcagttgaaaatccatatcttgaaaaatcagagtggggatggacgattgatccaaagggcttccgtattacagcgaaccaactttatgatcgctatcaaaaacctttatttgttgttgaaaatggtcttggtgcaatcgatcaattaaatgatgaagacgaagtgaatgatgagtaccgtattgattatctaaagaagcatatgatcgaaatgtccgaagcaattcaagatggagtagatattatcggttatacaagttggggcccgattgaccttgtcagtgcttctactggcgaaatgaaaaaacgttatggatatatatacgttgataaagataatgaaggaaaaggttcattaaaaagatcgaagaaggacagtttcaattggtataaagaagtaattgcgacgaatggtgagagtttaaaattttaattaggaaaaggaggcaccttgatgtatgtcttttagatatgtgtaggtttagacaaaaccgttatcttgtagtaagcaaaaagagcatacatgtaagtatgctcttcgataagaaaggtagatctctatgagcggagagactacatacaaaagcgtatgtttgtttcctttaaatgtgaagaaaaatcaacaaaaggtcaacgtaaatttaataaaaattcaacaaaaccgctattttaaataaaagagcagttagtgagatctaactgctcagttttttgaaaaataagaattagaatttgtttttttatgttttacatcaattaacgaaattgcattagagaggttaataaatttttatggatacgcaataatgtttggacatcgtcttcttgaagctgctgtaatgctagggacatcgctttgtaggaagttgagttttcaatggattttttcgatgcctcttgtcctttgggtgttacttttaattttatttctctacgatcttcatctgattgttttcgttcgatgaactctagactaactaaatcatctacatttacactcactgtacttttaggaactgaaagacgttctgaaatctctttcagagtgatattagggattgtataaattgtatttaaaatacccatttgttgtactgttagccctaaactggaggcattttgatgtgtgaactttataatttctttgttaatggatataaatgactgaacaacttctccagctagtttgaaattgttgtcttttaaactcatgatactcaattcctttctttcttaaattagcttaacataggatagttcagtgttgaactatttatttataaactaattcagaaaagaaagcaccatattgtattgatagaaaacttaatgaaaatttcattttgtattaagttggaatataaaaagagcacttagtaaagtgctctcgtgacgagcctcattttataacgactattttataaagaaaggaactcagaatattatatgtgcgccagtcaattgagtaccttgtacaaataaagagcagctagcaaaagctaactgctcaggtaatggaatatggttcgaaatgggttgtctacagtattgacggaatattggtttttattcgtgaagaattacgtttaacttaatgcatagccaacggtcaaagttagtgttaaaaacactgataataaaagtattagtagaacggttgctatgtttctaagcatcgcaacccaattatttattttagaaaatcctttcataccagcaaaaaaagttcctattgttaaaactagtaaaaaaataaagggtggataggtagtgaattcataataaaggttttaacgattaggcatatttaagaatctcgaacataagatggtaatgacaccgagaagaattcattgtgttcgctactcgcgttaatacgttttgaaaaggcacctatttaggtgcttttttgtttacatctttcgagatagacgagcatatattggaatgtgtggatggaaaccattttatatatcagagcacctatcaattatgggtgttctcttattatgtaaaaattttataagttgtgtgggagttgaaaaatagtatattatctttcttaatgtacatattaataaaagtttttaatatcatacataaaaggcgggataatatgagtgaaaataagaaaaatgaagaattgaataagataaagaaatattattttaatgaggacaatcaaccagtagctggtatagagctaattttgccgccggatataggaatcatgttagacccgaaatcagttaatgatgaaagtagagataaataagtttaatttaagcatccattcgggtgcttttttctttgttatatagaaattacacatgatccccctttaatacatgacttaggcatagttgggaatgagatatcatataatgatactgaacggtttccaacatgttcccctatatttttttaagcgagagcacttattgggggagtgctctctttcgtttgcacataaggaattcccaaacatacaatatcgagtcaatgccaatcaacttattccttttccgatatatatatattccgctataaagcccttttaggttgcgccattagaacgggcaaggcattgtcgtatattttatactcagaagcttagggcactttatagtgttctttttttattgaacaaaatggaaatttgaatagaaaacatatccttaaaataaccttaatttaactatgaatttaataataactgaaaactaaatggtataattttctaaagaaactcaaataaagtttattttagaaaaggggtagaggaaaaatgtttcagaaacttaaattttatttaatgagcatattaattagtgcatttttaggtgggattattataggtgctaatttcttggtacataacatatataatttagttgcaggtaaagaatatcaatttaatatgtggtcttctattattatatttagtgttgtatttatttcgggtttctcgtacatgttgaagaagggaccagatatacttgttaatgattaaaccaatagcaattatcgtaggcgctgccgtgatatgggtagcgtcttgtttgttgttaaggaaagataagggatgagatagacttgcaaattgaaatattattagtctaaaacataaaatatagactagtaaacaagctgttttcaccttttaatcatagaatatgatgaattctatttttagaggagggaatcatatctatgggatggaataataattttggacattctcgagattgtaatagattttgggatgatttagtattttgcggatgcggtcgtagacgtagaagaaacgattttaacgactgtcattgtagacgcgattgcgattgtgatgagtgtcgtcgtagacgtgatcatgaccgcaatcgtgatcatgatcatggtgaacatcgagattggtaaagtcttttgaaggagtgcatatcttaatagcactcttttttattttataaagaatttactttaaacatttcttataactaagaatacttatgtaaatataggaaacatatttgattcttggaatgaggggatcgatgtggatataacgcaaagtattgcaagaatagttgctaatgggatagatcttccgtttacttcagttagaacaactgcgtggattaatggacctgcaaatgatttaattgttacgactaggcaaagagtgaatgagctttatcgtgttatgtggtcgcgggtgccagttatgctaaaaatgtatttcattcagggggcggacatagtaagatttgctagagttgcaggagttgatgaaagtataacgggagaatatatatatcattttatttggtgataagacaaactttaagtaacctaacagctgcttttttattttataaaaaaagaacctgcaaacctgcagattctcctgataatgatttatggagcaagacccgaaaatataatataataattcgaaaatgagttcaagtaaataaaaagaacccgctggagttcgggtcctttcagaagtgatgatgtattctcggcttgggaactgagaaaaacacaaaaatataatacatcgagttttagagaatttcaatattaaattaaatattatcgtggagggagttatatcatttgatgaagaaaacaaggtagtgataaagcatatgaattttaaaaaaatgagcgggatatcttaagaaaacataaaattattgaaatttttgtatgaattcattaatatggaattatatttattgtttaattgattccgtttattcccacaccttattgtgttgtggttgagttgtagaagcaagttgcgtcttgttttatttatgaaagggcttttttgagccgattagtgtatatatagcttattttgctatgcacatttttaatcgacttgaagaagccctttttgtattgtcttcaagttaggaatcatttgtaaaaaggtctttagatttaggtatataaataaaaaagggggaatctatttgtatcatgtctatttcaatggatgtatacgagatttccttttttattggagagatgctttagagggaaaagttatcgctttactgcaatccgtgattttctagaaatggatgccgattctacacagctatcatgtaaaaactgcagatgtggattgtctttttaagaaagatgatcttgcaaagattgtgcatcatgattgagtgttagaagtggttaagcgtgcagaaaaaagtaaactttctaaaggtagattgaaaaagatagagtttgtaattctatctttttcttatattcaattactacagaggatttaaattcactaaaagaaaggtagaagagaatatgaatacatctatgaaaaaaatctagtaaatttacgagttgattttgctttcaagcgcttgtttggggtagaaggaaacgaggatatactcattggttttcttaatgcggtattacaagactctttagatgaggaaattatttctttgcatttagatgatccacatcttccaagggaacaaaaggatgataaattgtctattttagatttgcgagctacccttaatagtggtataaaattaaatatagagatacaggttcgcgacaaaaaagacatgatcgagcgatctttgttctactgggctggcatgtattattctcaaatgactcaggggatgaagtatacagaattaagaccaaccatttgtattaatatagtggatttcattctgtttccaggagaagaggactttcataatatcggtgtagtcatgaacaaaaaatcggagcacataatttcagagaatatgcaattgcactttcttgagattccaaaggttattcgagaatggcaagaaaatcgaatggatccatgggaggatatattagcacgttggctattattatttcctgcatatgaagatgagaaattaactacaatcctggagggaatcgcgatggaaaaagatccagttttgaaaaaggcaatagaggattgggagcgtttaagtagtgataaagactttttacgcttatatgaggcgagagagaaggcaataaaagatagaatatcagaaatagagacggcagaagaaaaagcagcaaaagaagctagaatagaaatgattcataatttaattaaagtaggtgtacctatagagaagatagcggaagccgctgaattaagtgtcgaaaaggttaatgaaattttaagaaacaaagagtagatagaagtagtgaaaaacaggtacttgtgaaaaacgcacaattacctgttttttgtttctaatgaatagtttgataaacacaaggcttagacactccttaataggtagtatactcttattaaggagcataataagttgttggagagattaaaatgaataagaaaaaagaagcgcatacccttagagataaaattccaaaatggataaaatagaatcatgttgctcactgaaagaagatatacattcttatcaagacctaaattgtaaaaagtcataaagaataaagtgcgatacatattagacatgaccaatatgtatcgcacttttacttcatattggggtcccgccacatcgctatcaagctaatattttgaagaaccaccaaaacaaaaattttacctctcgacagttatatttgagaattaagcttattttttcgttttggggtgaatctgttttcttaagttgatatgcatgtatggtgacccctataagtggcgttttttaccgttatcgatttctatcaatacctagtgacgttaataacagaattgccaaatttaccgattcaccagcagctaacgatttgaaataattacatgccttggtcgaaaaaaatccaagccacatgtgcaaactagccatctatccgaaaaaaattaggatagatggccattcatcgtgtgtaccgaaaaggtggccctttttttatatttcgggcttactttccactagaaattgaaatactaaatttagactgttgattaccgaatcgttccaatgtcccctcgaatttcattccaactctttttaatagtccacaagattccatattaagtgactgagtttcagcgacaatagtggttaagtttaatgcactaaatccatggtttaatactttcataatcacttcttttgcatagccttgaccccaaaactcaggtaaaaattgatacccaatctctgtattaatcccatcatgatatgtatcaaggaaaacaaaacctataaattctttactatcttttaaaaatactgtccagtggagggagctattttttgaatttaatatatcataaaatctaattttatatgcttcttcgtcgataatacctcctaagtattttcttactagctcgttttcatataattttttaatgtttttataatcattttcggaaattacgtgtaactcacatctctcagagaataacaagtaaatctctcccttcgataattattattattttcctggtaatccacctatgaaaaatatgtgctctacttacaaaatcatataaaacatacatcctttcttatttagtcttccataacatggtatgatgtgaaatgcttaccaggtcaaggggcatttatcaatttttttgtatgcgctaatatgtagtgggaagggagtgtgtatgatgacaaatattaaaaaatcgcagaactggctggggtctcgatttctactgtttctcgtgttttaaataattatccgtatgtaaatgaacaaaaacgaaaagagatattagcaattatcgaaaagttaaattacacgcaaaattcgaatgcgattcatttagtacgaggaaaaacaaatgttattggagtgcttcttccatttgtaaataatcaatattacagtgaagttatagaaggtatttcaagagaggctgtaaaacataattacaatatgatgctctgccaaacggataatagcgcggataaagaaatagagattttgaatatgttaaagatgaaaaagttagacggaatcattagatgttcgaaagtcaatgtctgcacaggccaaagggacattatcttggtgctctcatacggattccgaagccatcccacaaactccaccaagtcctctaatcttatatgcttgtaatctttctctgtttcctgtaagtacaagaaatactgtttgagtacaacaataagtcttccgtgtgttgctgcttttccctgtaacatccaaatacttgaggtacttcaccacaggaatcacaggaaccccatctgaatctactaatatgtatctctttccattctctaggatcacctcttgtacacgcatagttcttcacctcttaactccgttgtacgatcggtctctcgaccttgctacgcctcacgttgtgggctatattccctaatacaaaatcgaacgtaagttctcgtattattgtatacataatagaccatactttcaacctctaattatggaatatatcatgtaagaaaaaagcggatttatgccctaatattggacatagtatccgcttctaattatagtctgtttaagaatgctttaggtcttaaggacggtaatattttttttattcttatagtatggtacgatcctaacaaagagggtataaataaaggtgtaaacaaggacttgtttttataaaaacgtattgctataatataaaggtaataagattttacaataaaaatataaaattaatcagttcgcatataagagaagacctcaatatgcgccatgtccttaggggacgtgtgcgtgtattggggtctttttgcgttttgcgagcaaaaacatccggaggtgcaggaattatgttgaattggttgtctgcaaaacttatgacaacatcagtaggagatttcttactggcaaaaagtagctttacgaaggggcttggtggtagtggcagtggtgccaatgctgaaaccgtccaaaaaagcatgaacactttggtgaaaaccttaattggttttgggggaatatgggtggcagcttgcgttgtatttgcagctattaaactatctggtgcacaagggaagaatcctgaaaaccgtacacaagctatgattggtttagcctgcgcagcaattggaggctttgtgatgatcaaagcgtacgatatcgctgcttgggttacgacaatctaacataagagtttgtacaagctttcctcgatttggggagagcttctcttatacaagggaggaaaaagaatgagaaaagtaaccgttcctgttgatatgacttcggaacaaaaaacactactaggtgtgctgagcaagcgccaattgatttatctattgggtggcggagcatccctttatttatatgtaccatttttatggcgactatttgcacctattgatgcagtagtagcgttttttatttgcttaattttagcactaccaacggtaataggtgttatagcgtttgcgtttatatataaagaaaaacaacatatgtatctagataagtatttaattattaaaatgcgtagccgctccgaaaaaggtaagtggagaaaagggtacgagccaactatatgggcaaaggagaatctgtaaatgttagaaatgatatattttgcggcgatagccattgtaggatttttcttttatcggaaaatgaatggaaaaccactgtttggttctaagaaaaaagggaaaaagcaaggtggagtagagaaacacactattgaaaaagctggaaagaaaaataaaaaaaatatgtctgctgaatcggaaattgatgaggataatgttgacttctttcgtgcttttgtagaagacattaaggaaatcgataatcatatgattcggtatcatgacgacacatttgtcctgattgcggaagcacatccagttaactattacttactttccaatatggaacaagaagcgattgatatcaaaattgaatcatggttaaccacattagagtttaatacgaaagtatatattcaaagtaagtttgtagatttaacagatcctgtacgaaaaatgacagaaacaatgaaaggtgcgaaggaccttacaccagagacagttctatatgggcaagaagttatcgataacttagagtactggcaacgttcgcaacctcgatatgaacaaaaacgttatttaatttacccatacaaggttgatattagtacgattactgctgatacagaggaagagttggaagaaaagattgtggataaggcgtttaacgaattatatcgccgttataatgcttctcgaaatctactatcgaaagcaaaaattaatgtagaaatgttaacgaaagataaattaatagaacttttatacgtagcatttaaccgtcgtaaagctgtaaaagctcgtttccaggacttaattgaaaacgagaatttctccctctattcaacaggagaaacaaatgaaagaaaactagagataatgaagaaagtgctagcggaagaaaaagcagaaaaatcaaataacggggtggcgtaaacatgaggttattcggaaaaaagaaaaaggaaaagaaaaaaatagaagcagaagagaaggatgaattgcagctagaggaggaagaggcggaagaagaggaagtaccgacgcaattagataatcaaacaacagtgtttgatgttattgctccagaaggaatgaaaattgatgcagaagattatggggtcattaaacaatctttaggaagtaatacgttcttccgtccgttttatattccacgtgatgggtacccgcgtatgatgcaaaccaattggctcaacatgttaacttcggctggggaagtggatgtcatgatcgatattcataaagaaccaaaagctaaagcaatgcgatcattagatatgcagttgacgatgttacgttcgaatctttctttccaacgtacacgaggaaacattgaccaagaaaaagacttagatgcaaaaattcaagatacaaacaatttaatggatgaaatccagttcaatgaaaacgactcctatatggtgagtaccatgggtgttgcgtatgccgaatcaaagaaagaattggacgttttatgtgagtatattgaagatgaaatgcaagcatctcattttaagattgcaagtacttggaaccgtgtgaaaagtggtttgaaagctactatgccattaggtgcaccaaatacgctgcaagatacctatcgaaatatcgatagacgtgcgttatgtacgtttgcaccatttgtatcaggatccgggagatttaatggtggcataccaataggaaagaataaaattactgggcaagtagaatttttaaattcatttggtaatgcagattatcgcccgccaaactataacattggtgtaacagggatctcaggttccggaaaaagtttacttttaaaaatgaagttagctcgtgaaacgtcacttgcagatacgcatgcaatgattatcgatccagaaggagaattcgtaaaaattacaaaacgtctaggtggtattaatttaaatatttcacctgaaagtaatatcattatcaatccttgtgcaatcgctgtaacagaacttcagattacggataaagatgaagagctagaagcacttgaacaatatgataagaaagaacttgtagagtgtgatggcatgaagtatgtgagatttgtaccaattttagagaaaatcaatgaaatactaggtttctttgacattattattcgcgggcaagactttgatcaaccaggattaaatgtattccaacgtactatgctagaagatgcaatccgtgaagtgtttgataaacatggtattacttcacatccttcctctttatatacagatgaagtgaagaaagtggatggacagttaattcagtctcaagtgagaaagccagagccagagttaaaagaaatctatgatgtcatagtagaacatcatggagacgatgtaaaagcagaagagttaattgctgcgattcgaccattcttacgcgatggttcaaaaccattatttgatggacaaagtcattttggtcgtggtgtggaaactcagttaaatgaatcacgcgttgttaatttcaacattagtcatttagaggaagggtttttaaaaccaatcgctttccacgttatcttgaactatatttgggagcattggattaagagtccagaacatgctatcaaacgaaaagtactgtatgtggatgagatgtggcagtttatcgattatgaacaaacggttaacttcttagaaaaagtagcacgtcgttcacgtaaaagaaatgccggtatgtgttgggcaagtcaggactttgttcgtatcttagaaaatgtaaaagctcgtggtatcttgcaatctactttctcttatttcttcttagaacaaaataaaattgataagaaaaagatccaggagaactttaacttaactgctggggagcttgatattattctcaacaaccctggaaaaggagaagggattttccgtgtcggagatagttcggtttggattcaaactgatccatctgacaaagaaatgatgttcattgaatcaaatgaagcggtactacaagagcttttaaacaatatgaagaaagtacaagggtacgcaggataatggcgtactcttaaaaaggaaggtgaaattatgcttgagaaaatagtagagtgggtcggaggcttaattattgctatagtaaaggcttttcttagtccggtgtatgcaactttggatccgctgccagttttagtgtttggaggagagggaacagaaggaaaggggacaaacttagatttcttattttcaggtaattctctaaccaaagtattagacacaggcatgcctgtcatgttcaagcttgttgctttttgtgtccttgtcagtgtagttattacggcggcaaaatattcggcaacagctattaatccaaataatagaacagcattaatagagtatgcgaaggatttgatgatcatttcaatttttctttggcacctcgattacttctatacactcatatttgaaatcaattcttggataataatagagtttagagacgctgttaatgtagcaagtgggggggattttgatccagataagggtactaaatttctacaacctggatttggtggggctggacttaccattactgagctgggtttgaaaggtcatgaaaatgactatatgtttattatatttggtttgtttatagaagctggtctcatcgtctgggcaaacttttactacttaatgcgagcggtgtcactatacgttttaatgttaattggtccgttaatggtaggtatgtggctatttccacaaaagaaacaacagacattatattggatacgtgaatttataggagcggtgttcatacaagcaattcatgcaattaccttatggctcattatttctttaattggagcagcaaatagtccgttaatcaaattaattttacttgctatgtttatcccaataggtgagattgtaaaaagttttattggccttagtaccaatgcatcaggtggcattcatagagcaggtacgatgatgggtatgggtgctttagcaagtgtggctggactcgttaaaggtgttcgtgatgactaccgtaattcaaaagcaaaacctgatgataaaggggataaagaaaagacaaaagaagatgctgataacccgaaagatgcattaggagcgaatttagggacagatgttggtacaacatctcgtgcagctcgtatgttaaaagctggtcaaattggaagttcaattggtaaagcggctggtggacttgcaggtatgacagcaggagctggtcttggaccagaaggaatggcaatagggacatttgctggcagtaaagcgggcggatttactggtgcagttactggaagatctgctgctgcagttggcgaaggggctgtagccttaggaaaacatattggttcgagtgtaaagaagggtgcggatacgtattcaaatctaaatgacaaatcttatccagaactaaccgatgaagatattgcacaggatttagctacaaaagattttgaaaattggaaagcggataatcccgattctgcagttgcaagtcgcttaaaacacgcattccctagtgcctccgatgcagagattgctaaaaaagtggcaaaaacaaacaatgatcaaatgtctcgtttctcaaatcagcggaaacaagatttacaaaatatgaagaaaaccgctacaccatatggaaatgctagagagttagttaacgctgcaacgaatgcattccaaaagggttatgaggcagaccataaagatacgtttatgagtcagttaccagaaaatatttcagcggaagagaaagagagacactggaacgaccacctgaacacaaaagtacaaggatttagaaaccacgcagaacaggcggcaacaaaagcaggagccatgccagttgatgcgaaggataagcaaggaaataatctgtttgataagtcctatgtgaataaagatgcgtttgcttcccgacttgcattaggaaaagtcggaaaagcagttgaggatgtaaaaggagaaacgttagaaagtggccatcaaaatatgggacaagtaggtgctcttgtcggtgcttctactgctgcatttaagaaagcgtatagtgcagaccataaggctggattcatgaaacaattccctgcagatatgccgcaacaagaaaaagaagccgcatggaataaacatttaggtcaaaaagtacaaggatttcaaaatcatgcacaacaagcggcggaatcagctggtattgtacagcaaaaagatggtacaaactatgcgaataaagaagctttcgcttctcatttatcacaacagttacaaaaagatcctggtttaaatgctatgggtgtatctagcacagcaggcattcagaaggcagtcaacggtgtgaaaacgcacggtttgacaagtggagcaggaagccagaaagcgaaacaagtaagtaatgttgagaacctggtacaagcctctacagaatcctttaaacaaggctatgcagcagaacaacaggcaagctttatgaaaaagttgtctccaactatgtctcaaccacaaaaagagcaagcttggcagtcgcacctgaatgaaaaaggaaatgaatttaaagcagtggcacaacaagcggcagtacaagcgggagcgatgcccgtacaggcgaaagatacgagtggtaagagtttacataatcaatcgtatattaataaagatgcctttacttcgcaattaacgaaaggattacaaagccatgcaaatcttggaacagtgagtcaacaagtaggttctggaattactagtgcgattcaaggtgttcgttcacatggcgttgcaacaagtagcgcaatcaataaagcagtatatgcagcgacacgaacgcaagccagtatcgcacgtgcaggagatctttccgttgcggaaattgaacgctcttatgcagatgcatcaacaagtgtagcaaatattgcacaaagtgctggtaaaatgtctatcccaacatctgcagtgggacgtatgacacagcagagtacaaaacttggcatgagtgtaatggaaggtgcgaaacaccttatgcttgcggatagcattgatacggtatcaaatgcatactatagtgctgcgagtgctgtacaacaatccggagggaatgcagtacaaagaatgataagtggaactaatgctgctgttaatacatcattaggagggaatgcagcagagcgtcactataatgtgacaaaaggcttaagttacgccgcaggtgtgattggtggtgcaggtgcttatcaagcgactgcacgtatggtaagtaaacataatccttataacaatgctgttcaaacagaggcaaaagaaattcaagagattcagagaatggtaccaacaacaacggatgctactggaaaacaatcggttgttcaaggtgcagtacgtcttgttacgacaaataataaatcctggattgaagcaaaagattctagtggcgtgacgcaagttgtatctcgttatgctagtggtgatagtagtattcgttcgggacaagtcgtatatcaagatttaaatatttcggacggacaattaacgcagtaccgtaatggtatgaaagctacaccagcgtatgttcaagattctagtggtgggaaaattagtatcaatcgttctatcaacgttaacccaaatcaattagtaggaaaccaaaatcaaaggtcattacaccagaaatcagtatttaatgaaccgccacttacggtcaatcacaaggtggacaatggtcacttctatatgtctgatttagaccaaggtggttataagaatgtacaaatggtcgtagaaagagatcgtagttatatggttgcgacaacaacagacggtacactgtcacgtatttcgccattcggaaaaggagatacgcgcttacaagcaaaccaaaggattgaaagagcttgtgaagtgaaggacagtagtattaagccaagagaagaaattctagtaacacatacacaggacaaggttgttcgtacagagacgcacctgaatttatcagaacatgacccacaaaatctgattccatttgcgccaaaccctcgcttagcacagcgaagaggaagaaattctcaaaatggaaaatatggtgtgataagtctatgagtcaaaatcctaacgatccaaatgaacagaaaaaaagtaatcctttaaaagatgtagcttcccactttattaagaaaaaagggatgcaagcgcgcgggaagatggcaaaattggcagggaaagcaggaaaggcagcagcgaaagctgctgccaaaatgctaaaagcaggtatactaaaaattgtgggtgccgttatagcagcggttggagtacctgccgctttaattatgggagtaattattgctgtgtgtgtgattttagtctcttttgtaccttttactgatgatgaaggtaagacagaggaacaagtaaaaaaatatatggaagtctcaatggctttgaatgtggattggaaagaggtcgtcgcctttgacatggcacgatatgataatgatttaactggtaaagatccgcatgatgctatatcatatttcttggatatccaatatgaagaatatacggaaaaagaggtatgcgaggaaggaccgaatggtccttgcgaaaaaaagaaaaaggagatgcaaaaaaccaagtctgaaagttattctggaccagatgtaaaaaagatattaggagatacagattttaagaaaaaaatagatgagattaatgcgagtggaagtaaaaaagtgacaacatcttctcatgggctagagaaagccatggaactcgcaaagtttagtaaaagtcaaaaagagcgggctcgtgagatattagaagccgggatgttagaaggaatgtatggacatcttgctcctactactggtggatatattggtggtatgtgtgtaggtgctgtgagtccaggtggagaacctgtcaatatcaatgaaaaggtaacaggttaccttcctaaaattaaagagatggcggaaaaacatggggttgctcaatatgttggtattctcgcagcccaaatgatgcaggagtcagctggagcgggaaatgacccgatgcaagcagcaggcgcgacacgtttctctataagcgtttagacgtgaagtgagagtgttgctgaaagattttgtacatgcttaaacaagcgaaaatgtacatgtttatcttgacatttacatcattatggtacaaccgtgtatacatttaccaaacaaactacatagtttaaattagtaaaatatattgagaggaaggaaataaatctatgaaagtcataattttgtgtggcggaaaagggcttcggatgcaaggaattttagaggacattcccaaaccattagttcgagttcaaggaaagcctctcctcttgcatataatgaattggtatagaaaatatggacattctgatttcattttgcccttaggatataaaggtgagaaaattaaggaatattttatggactttagctggaaagagaatgactttagtttgaattttaaaaccagtcaatatacgctacttcagaaattagaaaattggaatatacactttatagatacaggaattgatacaatgaccggggcaagactaaaaaaacttgaatcctttgtacagggtgaaacctttttattaacttatggtgacggattagccaatatagatattgatcaactaatagcattccataaagaaaaaggaaaaattgctacattaactggaattaaaaaaaatagtcaatacggcctattggcggtcgaagatggaattgctattgattttaaagaaaaaccattacttgatgaagtaattaatggcggtttttttgtatttaacaaagaaatattcgattatttaagtaataatgatgattgtgttctagaagaagatcctcttcgaaatttaataaaagacaatgagctcgcagtctatgaacacaatgacttttgggctagtgtcgatacacctaaagatttaaaaactgtaaatgaaagttggaatccaaataaattttagtggagaggactgaataagcattgaactctaatgataaaaaaataagtttacctcgattgtatatcccctctaatgagaaaatagttaacccactttcaacaggaattaaagcttcaaatctctccaaaaaaaatactcaaaaaagaattgatccccaattctataatcaacaacatgatctaaataatcatttctgcgtcattgtaggtagtgagtatgtcttgaaaattattgctttacagcaatcattaatgcagtactcagaaaaattcacattgtggatttgttgtatagatccttttgcatattcactattaaaagaaatgagtttaattaatgtaaaccttttacaagttgaagaattggaagatcgtgaactaaaagcaattaagagaaaaagaaaagtaaatgaatattgttggactttaaaatctgtcttgatagaatatttattggtcaattatgatttaccatctattctatattgtgatggtgatttatgctttttctctgaccctaatattatttttgaggaatggggtgaccattctattttcctaaccccccaaagagatcgtgattgggtagaaaaaatgtatggaaaatatcaggctggtctaattggatttaagaatgatctctatggactaaaaagtgtaagatggtggaaaaataaatgtatagattggtgcagtgccgaggctgaggaggggaaatttggagaccaaaagtatttagattatatccctatatattttccaaaagtaaaaatttcaaataacttaggtataaatgctgcaccttggaactgtatatataataacgattataaaattgacaagactaaaaacgatatatttattgaaaacgacaaactagttgtttaccattttgcatgtattactatctttactgaaaatgattttgatctttggtctttgggagaaatttcaatacccaataatatattaaaccatatttacactccgtatttagagagaattcaatttgttttaaagcaattaaaggataaattcaataaagatactaaacaatttttaagtaaaaaagatataaataaagctcaaactttatataaagattcacaattaagaagaaaaatgaatcaatccaatcattttatgaacttttccatgattataagtaaagaacgattaattcaaggattgacctcttattattccttagaaaatttcaacgctaaatttactgtatggatctgttgtatggatgatttaacttatcaaatattagaaaaattaaaattaaagcacgccatactaattccggtacaagaaattgaaaatcatgaactcctcagtataaaaaatgatagaagtttacaagagtattgttggacattaaaagcgcccctatgtctacatgtccttagtctttatccggaagttgatcacattatatattgtgatgctgatatgtatttctttacagcacctaatatcattcttgatgaatggtggaagtactctgtattcctttgccctcaaagaagctctactgaaattgaaagcatacacggtatataccaagctggtttagtaggcttcaagaacgatcaaaatagtaaagaaattttaacatggtggaaagataaatgcctagaatattgcaataatcaatatgatgttgaaatgaatagatggggtgaccaaaaatatttaaatcacattcctaacatcttttctaatataaaaatcatgactcataaaggtattgatgcagcaccttggaatgtcattttaaatagcagttctatatccaaaacagataataaagtttttattgatcaagatgaattaatagcttttcattttggaagtatgcaaattattaatccaaatgagttcgatttatggaaacaagaaactttagaattacctccagcagttttagattatatatacattccttatattgaacaattgaacaagacatgtcatacccttcataatacttttcaaaaatctccctcctctttatttgctgaccaaattgatacaacaacaataaaaaattattttaaatacccctccactcatcacaattaagactgatactttccttatttaaaaataaatctatttatttcagcaactaaaaatacatcttaataaaggatagattatcactatgattgcttcatttaaaaataaaactttccttattactggtggatacggttttattggttctcacttggcacgaagacttttaaatttacaagcaaaaattgttcttttcataagaacaccatcaaactcttggagactaaaggatattctaaaatatattgaaacctatgaagtagatatacgagataaaaaacaagtacaagatgcaataaagaaaattaatcccgattatatctttcatctggcagcctatggtgtaaattctgcccatacagattacatccatgctatagaaacaaatgttatagggacttgtaacattattcaagcagcaaaattggtgaattgtaaaaaaatcatcaattttgggagtagttctgaatacggtaacaagatggaacctattcatgaaaatatgttactaactcctgtggacatctatggaagtaccaaagctgctgctactatactcgcccatcaaattgctagcgaaaacaatattaatcttataacattaagaccttttggcatattcggagaaggcgaagagccgcataaaatttttagctatataatcttgcgagtattacaaaacaaagatgtaaatttaactttatgtaatcaattaagagattattgttatatagaaaatgtaatagatgcctgtatcctagccgtagaaaatactactgtacaaaatgaaatctttaatattgggagcggcactattcaccccttgaaacattatgtagaattattattcaaacatttgaaaaccaattccagaccaaattacggtgcaatttcctctagaacaaatgaaagatgggttcctgaagcggatgtgcaaaaaataaaaaactctcttttctgggaacctagaattaatattgaagaaggaattataaaaactgttaattggtataaaaataataaacatttatacctaaccccctaaaaatagggtactaaaggaggtggactaattgttaaaccaaaactttaataatgctttttacggaaaaagaattttaattactggacatactggttttaaaggttcttggttatccctatggttgaatgaattaggtgctactgtaatcggatattcattagattctaaaaataaaaatgataactttaacattactaaccttcaaaataatataattgatattcgtggagacattagagattttaataaattaaataacgtttttacagattataaacctgaaattgtattccatttagctgcccaacctctagttaagtattcatatgaatatcctagagaaacatacgaggtaaacgttgtaggaactatgaatgtactagaggcaattcgattacatgaatcagctaaaataggaattatggtgacaagtgacaagtgctatgaaaataaagaatggccttggggttatcgtgaaattgaccctatgggcggccatgacatatatagctcaagcaaaggatgctgcgaacttttaatttcttcctatcgtaattcttacttttcagaagaaaaattttctcaacataagaaaataattgcaagtgttcgagctggtaatgtaattggtggtggtgattggtcaatagatagaattattcccgattgtatacgagcattagaatcaaacaaaaagattattattagaaatcctactgctattagaccctggcaacatgtactagaacctttaagcggttatttactccttacagaaaaaattataaataatggtatccttttttcaggagcatggaacttcgggccatccctaagcaatattgtttcagtagaaaaattagtgacaagtttactagatatttggggctgcggggattggacagcagaaaatataggtccaataaattttcatgaagcaaatttactaaaccttgacattagcaaagcaaaattcaatcttaattggcagccaaaatggtccctacaacagactttagaaaatacaatagaatggtataaacattataattcttacaccagttctgagatgagaaatctatgtattagccaaatcaaacaatattgcatgctttgaactactcccacttacccatacttgctgtgagttccttatggagggagtcttcttggttaaaataataaaagatacattaatttttatagtctaaattataaacctactatacctaaaattatgtgattgtccattaacaaaaattttatttcttcggttatttcaaatcaactattgacattatattgaagaataaaggaatcacgtatttttctagtgattcccttgttctgagaaaataatgtcttgctttaacgacaatacagtatatgtgattattaatttatttgttctagttatgaaaaaatctattcctgtcaaaagagctttcttcaaagaaaaacttcctttttttttttacttatcctactcgaaaagtaaataatgttatttttcagataattatatctactatttatagaattacactgagctttaacaagtttatgcttatatattgattctcttatttattatcaccaatgttgatgaatttatgcatagcttattctatacacaaatagctttttgaattatcttttcagaataaataaaggagactttctcttttatgcactttccccttaccagtcttaaatttccctttaatcaacaataagaacaaatcttcaatatagtacatcttctataaaataaaaccatacgtaagataattttactattacaaataatgacatagtctgtttcaccttttacattatctaaaaaagaacttgtaggaattcttacaagttcttttttatttcctttattctcttcttatttacatacgcaagatttatacatttggtggtgatacatactatatttatccgataaaataatctaaaaattaatacataattgatcgttttaagaaaaagaaatttcataaatcttcaatcacagttcttagttcacctaatagaacgtataaagactcatatcatcttttgattatttttggatgttttattctacgtatattcgacacaaattgattgttttttatgaattttcttgaaaaatattgtaatatcactccattttttcttctattttgttatgatgtttataattaaattggattaggatttttttagaaaatgggggcgtatattatgagtgtctcagtaaaaggaaatgagcaattaacctctctattgaacgactggtatcgatctatgctatctcagcaagttataaaagctactaatctaaaaaagaaaattgatgaaaaaattaataagttaagcattgaaccgaatcaagagcatcaggatcaaaatttgttactatactattcactactcgaatttcgttacaaggtcttaacagatagccttggtattcaacaaaatagttttgatactattagcgattatgatatgcctacagatcaatttctacaattctattatcattttttcaaatccattcattccacttttatatcaaattatactgaggcagaggaacattataaactagcagaaaaaatattggtagctataccagatgaaattgaacacgccgaattttactatagaattgctactttctatcaccatacctataacaatctcgcttctatcgaatacgcaaataaatcgagagcaatcttttcaaagtacgaaggttatgaagtaaaaacagccttttgtaatagtttgctaggtggttgctgcatctatttaaaacagtacgaacaagcagaagaatatctacattgtgcaattgatttactacaaaaaaatagggaagaagattccttgttatacgtaaaaaatactatggggtggctgtattctgatcaaagtatgtctactttagctattcgtcacctttcagaagtaacagagaaaatccctacacacttcaaggccatcttcctacaagctaaggaacattataagttaggagaacaatcaacggccagccaactcattgataagggactacagatttgcagagagattcataacgaagaatatacacaccacttctctattttaaaaaaattaaacgaaaatattccattggaagaattagaaaaaatcattcaagaaggaatcttatactttgaggaagaagaattatgggaatatgttgtcgaatacgccgaattatttgccacaaaatgtagacaattagagaaccaccaaaaagtaagtgactatttccatatttgttatcaagcaagacaaaaatcaatcgcaaaaggagtgttaaaataatgaaaaaaattagcttattattatcaagcattgcttttattggggtattaacggtgggaatttttcagttttctaaaacagatcagcttgctactcatgggcattatcctgctccttcatatagtgttggcgattatggtggtgcaccaccacaaatttaatgtaaatgtatttaaaaaccctccaaatggagggtttttaaatggcttatctgcctgttcaatacgcatagagagtacatattatacttatttactatgttataagatttttcatttccactctgtaacaagattctagcattctctcctagaatctcaacttaaatcttaaatccaccaattaactcttgaagttcttccgccatctgtgctaattgtattgctgaagaatttatctcttccatagaagcatgttgttcctcagatgaaccagctatcgtttgcatacttgaagaattttcttttacagccatagctatttgatcaatcgatgtatcgactttcattgcatcagtagtcattgtattagatagttccaccataccatgcacttttgacacaatatcatttgcagattttgaaatctcataaaaactttgttttgtatcgttagcaactttaattcccgactgtacttctacgcctacttcattcatagcttttacagtctcatatacgtctgcttgtatttccttaattaaacttccaatttccattgaagattcggatgattgctccgccaactttctaacttcatcggcaacaattgcaaatcctctcccctgttccccagctctagctgcttcaatcgctgcatttaatgctaataaatttgtttgttccgcaatattttgaatcgcttctaatatactgccaatttgctgtgatttcttatctaataattttatgacattatcggattgagaaacagagtgatggatagactgcatttgtgttacagtttgttctactaattgttcaccttcattggctttttgtttagtgtatatggatgaagccgatacttcagaagcattctcagctacgtattgaatatttcgtgttacctcaccaattaattcagctccagactcaacttcattattttgaacctctgcactgttcgagatttcttccatctcttttgtaatttgttctgtcgcaacacttgcttgctctacactagcagttagttcctcagaagacgcagctacatgtcctgcagatgtgttaatttgagaaataatattacgtaacgactctgccattgtattgaaactaccacctaattgaccaagttcatcctttgaacgaatatctattttctcggttaaatctccttgactaattctttgagctgaaatgactaattgtcttagtggagtaattatagatttgagtatgaatagaattacaattccacctaacaataatgaagcacctattatagtgagcgttttataaaaaataggattggtagcttcttcaatttctttcgtaggcattacgccagctattttccaacctgtttttttatttgtcttaaagcttatgtttcgatcttcaccattgaggctataagtaattactccatcttctgtcttgtacaattcatccactaaagttttatctaatttctctccaggttttagtgatggatgaacaactatagttttatcttgactaactatagatacaaatccttgcttcccaatttttatcattttggatgtttttacgatatctttaatattcaaatctacgccaatgacaccacttttatctgcattctgctttgcaattgcaattaccatatttcctgtagactttgatttatatggagatgaaacaataatctctccatctgcttttactgcatccttataccaactgctttctagcggattaaacccttctggtatttttccaacaggtgcatgaataaattgattgttactggatgccgtataaatcgtttctatctctggatgtaactgtatatattgatcaaatttattctgtacattttgcgattgttcaggattataatccccttgtgtgagtacctttgcaaaatgagtgatatctgtatgcttattttctaattcatcatcaacaatcttatctaaaatacttatattatcttttgctgattgtagaattgtttcattaagatctgtttttgctttattataagatgatactcctacgataaggcttggtataattaatattgctataaatgccatagacaacttcgttttaagctttattttccccaatctttcttttatattaaacactagctacttctccttttcatttttactacttatatagtttatttaaatttttctcctttacttttccacattcatttatggtaccattcgaaatgaaaccacaattacatcctattatccgtactttataatttagagatttaattttcacagacagagttttatctgccctcctttcgaatatgttatttttctagattcagcaattattagactacgaattattccaaataaacttgatgcaacatatacttcatttaaaaaataattattggatttgtttggataaaaatctagtttagcgctaatccaatcggatgaaattcttaccataatacattcactaaacataaataagtaaatttatttcttttaatacttatatttaactgccttttaaccattctaactgtattatttcatcgttttatctatttattacaaccacttttgtattattgaatcactaaactataaattctaaataggagaataaaataaattagagaattacattgtaacacatatatataagttgttaatattaaaatttaaaactttactatttttcatatgcaatattacatgcgaaaagccataatttttttgttatactatgcatgtggatttttcatccaaaatccacccaaacgcatatttatgtatatgccaccctaattgatgaaagtgagaagagtgtttatcatttttctcacttttttatttaggctctgttaatattgattattgataaaaagtattaaataagggaagacaccttagagttggtgcttcccttatttgttgattattcaaatctaaaataggtattttctaaacctattctttgctttaatgttctgcccaaagcataattatttggtaattctttttcaatgacacaaataatataacctgcttttcctgttgttaaattagttagttgtaagtagttagtgttgtcgtagatataagaaataatatattcatagaaattattttctttatcttctctattcataccaacattgtacaccctaactcttgctcctacccaaatttcctcatcatcatcaacattacttaaaggcatccatttcgagttatccaatatttcacccttttcttaattcattcgtttatacacgaatgttgctagacacaaactatcataagcatccgtcatttcattgattagacgaccaccgacagagaaaaaagactcaacatagctttttacccattgaaacacttgctcttttagttatttttacattttgaatctacgaaaatgaattcccttataaaaactctaacagagaatcttccttccaaatttcacctagggaattatttgttttccaaaaaacctaccaacatctttatcaactcattttagaatatttaaacaataattccatatacattacctgcataaattattcattttcttttatataagacctacctttttacttttgatagattattagacattggattattatacataaatcccaaaaacatgcggtattttgtagaattttgtctatcaatatgtatgtacacccttttgtagtggatatagactgtgaggtgtaaggagataccttacaaaataataaaaaggagattatagaatgagtagattaacaaaattctcaaagttagtatttgcaactttaatcgcgggaagtagtctaagcacctttgtttcgtcacacagtgtacaagctgacaccttagatcctaattaccaagacaatataaaattcataccaccttctagtgctaggccaaaattggaacaaaaaaacactattgttccagaagcaaaagttgttaaaaaccattatgtaaagtactctaaagcacatttccaaactaaagaaagtataccaaaagagatttattattcttcagaaggctttaagggctatatacaggcaagtaccgtttgggatatgggagatcatttcgcaacactatattccggaaccgttattcgatgttagacttttaatccattctcccctaatgcttaaaatggttaataactcactgccaatactgtaatatctattgttcataaaataaaccacaaaatctttcgatttcatggtttatcaaatataaagataatgctaaacgaatactctaacattaccttccccaaagttaattatagagtattttcaaaaaaaagacactcttgtagtgtcttttttatagtattttaaaaagaattccacctactaacacctttttgttgcgcctattcgtttatttcaatataatacttttccatctcgtatatgcaatagacaatgatagctaaactccaactgacaccataataattatgtgtgtagaagtcatatcccgccttaatacctttctctattacaacaaatgtaaatcctaaagccacccatttgttaattttcatcttaataaacgttaaagagataattattaaaaataaaatatttgtaagatgatttatcattagctcatatttttgaatgtatactgccattatacaagcaacgatattagtcgcaatgccaaaggcaatcaccgctccccaaaccctgtccgaaagtcccactcctgagtcagtcccttcctaaacaaatatccctttctttaattcgttcctacaccctattcaagatatgctaaattatccttgtctgatgaatatctatttatcttttcatatagagcaaacaaaatttctacttataattttttctttattagacaaactatgtctaagccgtttgaactagcggcttcactcttctggtaatgagatagcacaatttattgaattgactaactcattcaacccactggcaccggcaggcaacaaaatagttgtctgccattttcatgtatactttttctaatttcattacaaaccaaatgtgtgctgtactgatttcaaaaggacagcatttcattttttaaaatgtaaaaaagataagatcctgtctacttttggtataggactttttcttttcacacatactatttttgaacctgtttaccgatacgtgtcctaatggtgtcttgaattcctcctaaaaagggctgcagatacgactgcatgcccttttatttacgttgctgctctatattgagtaaaataattaaaaactaaaaatgtaatattacatattttttctgttcagattatgttaagattcacttcatagtcgaattatggtttcgtatctaattcagcaatatgtgaactgtttacctaaagaaaagacacccaaaaggtgtcttttcttcttttaatctaaaaaacatttctcctatttagtaagatccaattagccctctaacctaagcctcatatttaaaggcaatttaatcatacactcaagagttttcatctatttcaatatacttataacttaatttccaatcacatttccagcactatatttgctttcttacagaatttctgtcttgttcttaattctgtcaaaatcctcatgtagctatacaaagaatatatgctactatgatattaagaaactatgcgttcccttaaccctgtatccggccctgtatttattacagggtctttgtttattttattggcttataaaggttaatacacaaccaatttcaattaaaaccgtttaaatgttagttagaatttgaaaaaatatatctattaacttttttaacaaatgtaatctaatattaaatttctaaatctatactgtactatacaccagttaacactatataaatagtattaactatcttaattgaatattagcaataataagtataaacattatcaatttactatatcttacatttatgtaaaaatagatgtatgttaagcttattcaaaatctttcccctaataaagatttgaagtagcatttcatgattctccttactgttaatatgccttgaaaaagaaccctatagggttctttttcttttcattataacctcagtaagtccttatttaacatgcaaaaaggactgctaattatttgcagcccttttacacgttaatatacacttgtattacatgctgaaaactttattatattaggtatttataccaactaaacatgccattatcatttagatatataacacttcaaagtttagaagtatacaataacaaatctttcccagcttccagctacataactagtaactgttaattctctaccaccatttgctgatatatatctaccattacttagtgcttgtaatacatatatcctattgtctccaccattatataagataaatttttcccatgccccaattgatgtacgatctgctactactctaccgtttggctcaaacgaaacgtactttccattactttttgcttttaaagcaaacgtatataattccccagtcggaattaattcaaatttctcccattcattaactgcattacgatttgctactacattacccgatggctcagcagaaacatattgtaaatttgctgcctgtatagcaactgtccaacttccattaaataaattcacgccttttagtgaacctgctcttgatagatttgctgccgatacatcattcgatggtgtaatcatcaatatcattaaaaccatcggcaacatcattaaaactaacttttttgagattgtattaccacttgcacgtgttatgaacctcttcattcccattcctcccttaatatgcatagaactcatatacatcataccaaatatgtaaaatattgtaacggaagaggggttttatcaataaataccttactattctgtttcttttttctcaaatctatagcacttaaacatttatcaattctcaagcacatttttaaaatcccccctgataaacaaatatagcagttgatagcaaggagagtatatacaaaagagagagtattttcatttcacttttctttaaataaaaaccaaatagccgttcataatgaacgactatttgcatctaacgaataattagaaggttcttcatgttaatctattttgtttaatcccgttgaagtaacttgataggttctttttttgcctatatattcttgtttattattctcaaggttaagaagtgtagcacgtgtcttttcctttactgcttccccttctatatgggtaaactcaatgtaatcccccgcttttaaggacaccgtttggatttcagcagtttgttgtctgtttcccactatttccttattatacacaacattaccggttgaattctttactgtaatacttgcatatgtctgattaaagtaagaatgtggtacgcctgcttctaaattcacctgcattttctctgttgtcctattataatcaacttttgcgatttctctatcactatatccttttaaagaccacctaaaatgatttccatctaaaaccgttgtttctggcattttttctactttcttcaagccttcttttgtaacttcgtacatgactttttttccaaaactttcttgtttactgctgtctacatttattaaagtagctctatgcacaccttctaggtgtgtcaactcaatataatctcctactttaactggaactttttgcgattcagcattttgttgtttgtttccataaatgtctttattgtatactactttccctgttgcattttgtactttaatactcgcatatgtctgattaaaataatgatgcggtacgcctgcttttaagtcgatttgcatttcttctgtcgacttattgaaattaatttttgcaaactcgaaatcactaattccttttagtgaccatgcaaactggtttccttctaaaatactagaagagttcgggatatctgaattaaaacctaagttatctaatatagattttagatcaggtaaaacacctattctatcattccacggatcttgagattttgttcctgtattcggattacttaagatatttcttaattcggctggtgtataaggagaacctcgatgttctttagcaataccttgaatcgaagttgctgctccagcaataattggtgaagcacttgatgttccactaaatgttgatgtatataaatttgtagtattttgacttggatttgctgatgttgtatcaacattttctccccatccatatacatctaatcgacttccataatttgaaaaccataaacgttgatgtggaacagttgatgatcccgccccaaccataatagcacctgaatccttgaagtctggactatttcgatttaaaatcttttttccattacgatctttaaaattatctaagtcgtttgaaccatttgcgccagcttctataataataatccctttatctgtaccaacacgaattgcatcaaaaatatctggatgtacttctacaggtaaatatttatccccatacccatcatacgaagcttgtgcctctaataaaagaatatctcccgcttgtaaattatgtacagcacttaaaatagcatccgctgtattataaattccattatccctaatctgggatattacttttacatttgcttttggtgcaattccaatatttccaatttgattatcttcagatgaaacaattcctaatacagaagtaccatgagctctatgctggcttatattttgtcccgacataagcttaatatttttattgactaaatcctcatggttcaataaccatccatattccatatccacaaaagttgtatccttcccatcaccacctttaatgctccaagcatgcgaggcattaattccctttggtgccgcttcaagatatccttgatttttaaatctagggtcatcgtacggattaacagataaatttggtaactgtatttcaggaggggtcaaaatttgtttttcttgtatataagcctcctctacgagaggagatgtttcaaattttttcagtaataattctatttctatgttattaggagcttgtacaatataataatttaataaattattagctgattcattagcaactgatttagattgtactgataacttttcaatctctatcggatttacagatgagaacagacgattcaaagtaagttttgtattttcggaaaataactgctttaaattgttatcataatccccattttttattcgtttctcaataccatcttcataaggtaagtcaatttgatttttaaactttacaattaatctttcttcctgtgaatctctttctttgtatgtgacattattagattcagcgtaaactttattatgaatactatcattttgtaggattaaatctgttcctacaaatgtggtcattgcaattgatgaaattagaaaccctttgaatatgttcatactatacccgccaatctatattctcttgagaattttttaatgcgtataatggttaagatttttatataatatatatatctataatttaacttttgtagtgaaatctatgactttattaataatcccatagaggtaacctgatatattcttttctttcccatatactcctgtttactattctcaagattagtaagtgtggcgcgtgtcttttccgtttgtgcttctccctctatatgagtaaactcaatacaatctcctactttgactgaaacggtttggctctcagcatcttgttgtctatttcctataatttctttattgtacaaaatattaccggataaattctggactttaatgcttgcatacgtattagtaaaataaggatggggtatacccgcttctaatttaagctgcattttttctgttgctttgttatattctattttcgcgatttctcgattattatatccctttaaagaccacctaaaatgatttccatctaaaaccgttgtttctggcattttttctactttcttcaagccttcttttgtaacttgatatcttgctgtttttccaatggtttcatttttgttattttcaaggttaattaaagttgctcgcgttttttcctttgttgcttctccttctatatgggtaaattcaatgtaatcccctaccttgacgggcacagtttggctttcagcattttgttgtttatttcccacgatttccttattgtacagaacgttaccagaagaattctggaccttaatactagcatacgtactagcaaaataggaatgtggtacacctgcttctagttttaccttcatctcttctaccgttttatcataatctacttttgcaatttctctatcactatatccttttaatgaccatgcaaacttgtttccttctaaaattgttgcttctggcattttttctattttcttcaggccttcctttgtaacttcgtatagggctttttttccaaagctctcttgtttactattatctacatttgtaagagtagctctatgtacaccttctagatgtgttaactctatataatcgcctactttgactggaactttctgcgattcagcattttgctgtttgtttccataaatctctttgttatagaccactttacctgatgtgttttgcactttaatacttgcatatgtactatcaaagtagtcatgtggtacacctgcttttagatcaatttgcatttcttctgttgatttatttaaatttactttcgcaaattcaaaatctccaatccctttcagcgaccatgcaaattcattaccttcaaaaatgtttggagattcatttttgatttgtacctttttctcaacagtttgatcaaatatatccgttaatacaatttttgcataagcatttgttggtaatgatatagattgactgattccattttgataagatttaatatcattaattacgttaataggttggcccgtcatattttcattgttataaatttcaattttccccttaaattgcggtgtactattttcttttagtttccaagatacatttaatttttcattttcataatatatagattggatatcaaaatctaattttcctatttcaggttgagtaggttgatttagcgtgaatatttttcctgccccaatagtagactgcgtattacctcctgctttgacccatacatattctgaagtagatcctccatcatattgataagtattatcatgcgttccagaaatactttgattattccaagaactccattgtttatcaactaattttcggctataaccatttttcaagcgcgcttctcgaacattctgtccactatcagcccagtcttcttgaaacattcctaaaccatgattaaatgcaacattagcaaccggaaagtccataattgcaatttgatgccatttattctttgttacatctttcatccattgtccaaatttagtatgaccattttcttgccatgaacgcattgtcattgtgtaccaattgtagtctttccaaccataagttgtttgaaccttcattcctgttccttctcctccaaagggtccagcttgcgaattcggagataagtattcggcctttattgcttctttagaggaaattggatcccataaggcaaaatgtaaagtacgttttccattttcatcaaacccactttgttgttgaaaaccagcatatcctccagcttcaccacctgcattccagttgtgtacagcccagtacgtataaggtggtgtctgaactggtgaccagtctatactaataatatctgaggcaggtatattttggggactcacataaactgctggagcagctgaatgtgttgcagctttagtgtgcaaaatagacgttccaaacatagaaaacatgctacatgctgcggtaattataataactttattaaatctttgctttgttttctgactaatcactaatctacatccttttctaatttttattattgaatactaacgtagtagagaaatctatcaaaattcaaacaacatccagtaattctttaaaatactggatgttgttctatctttacatctgattcttacatattaattgattgtaattgctttccataacgatagtgcaaatatccaattcgggtcaccatttccttgatgattttgaacagcttcatacactgtcccttgatgttctactttatccccctttgtatatgccttctttggatcccatttttcataagatacattttgatctttggtttttacaagaagaatttcactttggattgatgtatttccagctgcatctacagccttcactgcatatttatattccttattaactgttaagttttgatcagtaaacgtcgttccttgtaccgtttgaatcaattgtccatcgcgtaatacctgatattcttttacacctacattatctgtagaaggattccattttagctctacactgttagaagtaaggttgcttgcatataatccttgtggctgtgtgggagcttctgtatctggtttcggattaacaatttgatttactttcttcagaccttcctttgtaacttcgtacatggctttttttccaaagctctcttgtttactattatctacatttgtgagagtagctctatgcacaccttctagatgtgttaactcaatataatctcctactttgactgaaactttttgcgattcagcattttgttgtttatttccataaatgtctttattgtatactactttccctgatgcattttgtactttaatactcgcatatgtttcattaaaataatgatgcggtacgcctgcttttaagtctacttgcatttcttctgtcgatttattgaaattaattttagcaaactcgaaatcactaatccctttcagcgaccatgcaaactggtttccttctaaaatattatttacattaggcatatctggtttaattggattagaatccgtactcttccaaatctctgctgttaaaattggatatcctaatgcagctactttttgaatggtatcgttatttggacgtaatccccacttctcaaagaaaggaatcaaattttgtttggctacttttgatgctgaaatcataaataattgttttttattatcatcagtttgtggaagttcacctgaaggcatgtctctatacaattgatgcaatttaggatagaaatcctctccatacgctaactgtagttgccaaagcataacaagctttacaaaaacatcgctaatttcatcataatttttattcacttgttctagatattgaaatgcttttggataaattccacttttctctaagttggatggttgattaaatgctttttctacagaaaggctgtatatattattttgtacttctgtcatattataaaacttccagggcgattgttgtctcaaatgtcctgcctcatgccaagggccccaaccatctgttataaatttattaatatctaacacgtattggattgcatctcctacatatgctgttcgataagaagttgcatacatataataatcgggagaatgattttcttctacgtaatgaacataatgtttatctacttgttcttcggataatccagctactttgtcttgaattcgagtagcttcatccatcttttttaagagttgtacaggatctgtattagaacccaacaaatatttcttaacacgtgcaaggctggccgtaattaatacacgttctccttttaactccactgcatgtgcattaggatattggtccagcatgtttattaaatcttgtttcgtatgctttcctagttcaaagaaaggcgtagtcgttccacctgttgtgattgttgttcgaatggtacccccttgttgtttattataaaaataaatcatccccccacttggagattggattgtgtttataccaggttttaatgtaaatgattttatcttagaatcttctctccaagaagcatcatacgaataagttccaatatatacctgaatatcttgattaccttctacattaatcgttatttgttcatttggctttgcatataaaccagttggttcatatggactaaatgccatactttttctttcctgttgtttcagtacctcaacatccccttttcctgggactgtaaatgttctattttctgatttaactgacttttctttttgcaatgatgtcgataaatttttttgctgctccttttgctccgcaaagacatccgatgaaaaaatcattccagtcgcaagcatagttactgtagcagtggccgcaagtatttttctagttttatgttttgaattattccccatattatctccctcatttttccttagtactcttaagtttttttgttttcttctccatgtttttacaatctaaactattcatactatttaaattgtgtctattactctatattttttcataaatatctccttttctttatgtattattgtatataaatgttatttgatgacacattaaataacaactttacgataaactcatcgataacagcctattatgttttgattctgtattctaaacttccatccaattagagaaatatatccaattggagaaataagtaaataaattacaacatttaaaggttgggatctcacgaaaaattcataaattttttttactttaaaggtttaaacaattgtgaccacatttgtttgaacctccacaatttttttctaagctattctctaaaaatcttatttttcgttgtaaataaacctgattggtactctttatgcaaaagaaaagatggaatctttaattcaactccatcttttttcgaaataaaaagcatctaattctatttgaattagatgcttacatttagtccttaagcctaatattctaaactatttacgcgtttgtaaatctttttttattacatcccagagtgaattatcttgacgcatcggtttaccctcttcatcccattttattttttctgttcccaattcataattcatccctgtccatgtgtcttcacggaatgcatagaatgatttatgccatcctttttggttaaagatagaaataagatcttgcatgtattgggtagcacctggaacagtacggttaattccaaactcctctgcaataattcgattagatggtacatgatttttcttagaccattgttgaattggcttcaaaaatttctctaatccctgcttattccacattacaggtttctctaagtctcctacttttactaatcctggatattgatattctttatttttcttttcaccttgactcgttaattcatatggttcatacatatgaaatgcgtaaagcgtttttttatcctttactggctttaagtatttaaaggcccatggagtagcatataaacctgaatctaaaataaccggtgtttcttggtctacttcacgaatggagttaatcaccttttcataaaatctgtttaaatccgctgtcgttccctccacttttgcataccatttctcgtaatcttccgtccaaaaatcattatatctattatttttagctgtttctggatgtggttcatttataatattataaccaaccaccgcggggtgatcttttagttccagagcgaggtccttccaaaattgacttgcttgttcttgatacttctcttcttcccatattctgtcgtcattcttattattattaaattggcgccatcgatcaccaggtaaggataacattgtaagaacgactttcattccttgtgattgtgcggcatctaaatccgcctttaatttttctagatcttcctttactaatccccgatagttatctgcattacctatcagaaaatcctttccagaagtatctggtttatcctcaaatagaaaatctttatcttttacccatttatcaggtgctaaacgtacatattcaatattagcttcttttgcacttttatagttttcaggtaatgacgtactattcatgaaattagtaccctttcttttcgaatcccaaaaactaatttttgaatcgcccttgtggtatgtatcagctcttacattcatttcctgtactccaaaactcatcatgcctaataacgcaacaattggcaaaacttttttcacaacttttccttctttctctttatatttaacacacataacatacctttgttttgttacaggaatatggcaattttccaaaaataccttttaaatttatacattggtagttcattcataaaaaaagaaagagataattagaacgttgcttcattttaaaagaaacaaaaaaggaatcctttacggattcctttttgcaatgcactctttttcaaatggtacattttgcacctacttttagtataacttataattcctataaaataaataagattaactgaaatttacttcaaattgtgataaaaaacataattaagaagcgcagataactaaatatcatccctttattaaataaaaaagattaaataattccccctccaaactaggacccctttacactttttacaaatattgttataattagataaactaaagcattatcccattaacaaagggactccataattggagtccttttgttaattagctattaaaaatgatagcatgtgattattgtataatttcttccttttttagatctgcatattcttctacgaaatcccataaaccttgcttttcgaagtaagaaatacttttttcacttcttctaagagtttaattgcttcatcttcattaagagaacgtaaaatattgaaatgatatacatactcttcatttcctaattccatacaaactgctaatcctttttcaataagttcttttacaatatttgtttttcttagcttatagtgttcacgcgcttgtaagaacactgctttaaaatgggcaatattcttctctgtgacttctgataaatgacgaattgctaatttagataaattttgagttgcatataatagtcctagattatgccttactattaaaatcaatttttcttcattatgtttttgcaaaaggtcaatggaacgattgaaatgttcttccgctttttcaaattgctttaagaatatacgagctgtccctaatgcggtttcacaagaagcaactttcacctcatatcccattagccctaaatacaaggaatatagatacttattttactttcaaaggctgaaaccttgctgcataactactgaaaataaagtgaaaagacgttcaaatccatatggatagatcgtcttttcactttatttcatacatatactgatttttcacttattcattttgtattgtacttaaaaaaccaataaattcatcttcatttacaggtttactgtagtaatagccctgaattagataacatgcattacgttgtaacactgttaattgttccttcgtttctaccccttctgctatcactttcatgtttaaagtatgagcaagtgaaataatggtttgtataatttcatctccatcagtagaagttccaatcctattaacaaattctcttggaattttcaaagtatcaattggataaagaggcagatacgctaatgaagaataacctgtaccaaaatcgtcaattgataaatgtacaccatatgattttaatgcttttaacttcgataaggtttccttttcatctaccattgctattcgctctgttaattccaaatcaatcgaattagcaggtactcctatctcttctatggtagatataatggtttgaacaaaatctttctgttcaaactctatagctgataaatttatccccatctttagatttgaaaagcccgcagaatgccattctttcagttgttgacacgctttctgtaacgtccacttcccaattgaaataatctgcgccgtttcttctgcgataggtataaactcaaaaggagaaatcagtccaagctctggatgttgccaacgtattaaagcctctgcaccaataaccttacctgccttactatcaatttgtggttgatacaataaaaacaactcattattttcaattgcatttggtaaatcctgttctaatcgtaatcgacgagttactttttgagataatgtctcgtcatacatacaaacagcattgttacctttttcctttgcgctatacatagcgatatcagcgtgttgtaaaagtgtagtagtatttattcctccaaatggatacactgctattcctatactaagagataagtaaaaactatgctgatttactacaaatggttcttcagttatacgaaatagagttttacacaaatccaatagctgttgctctgtttggttatggacaatgatcgcaaactcatcaccacctattcttgctagaggaatagtcggtgacagacatgtcctaaaacgtttggcaacttcttttaaaaccttgtcaccaatcgaatgacccaatgtatcattaatagtcttaaagcgatttaaatcaatatacaggagcccaaacttatcctgtgttttttgtgcacgcttaatagatctatctaattcttgttggaagaatatacgatttccaatctccgtcaccgtatcatggaatgcaaggtaatttatctcttcctgttgttgtttcatccttgttatgtcttttaccattacatagctcccaaaggtttgtccttctatcataataggaactatagtgacataccaaaagagtatatctttctcattgttatttttcacacgtaactgtagtgaagatgaactacatcgtttccctttctttatagctgcttccaattcagatttatcttcatctaaaaaaatagagaagcactctttccctatcaatacagcactttcttttcctaataacatacttccagcctggtttatatttaatacgataccgtttgaatcaatcgttaaaataggatccggatgatactcatataatgacttaaatctctcttgattttttactaaatcattagatttatttattaaatcccttgttctttgagatactgtttgttctaattgattattaaacacttttaatgttttagttaactctttgttttgcattcgtacgattgtatgacgaatcagtacaaatacaaaagcaatacaatttcccgtaattaatgtagctgaagaagtttgctctttcaaagtaaagccaattaagactgcaactgcaagataagggaatataccaagaagtttctctccaaatgtcggattaataataaaataatttcttttaaaagaagtattctttgggattgtagcacatgcccatcaacttaagaatttgcactacccccaagtgtcaaaaaacgttattcgattttgtacatgcttaaacaagcgaaaatgtacatgtttatcttgacatttacactatttcttttactaacttttttttaccgaaaatatcatctaagaaacccattattccctctcctttccttttaaatgcagtatctttttataaaataattcactataatatcctatttatcatacactaaccaggaaaatatatccttattagaagaccaattctttattataaagaaaagatcaatctttaaaatcaatgtccaaaacaattgataataaagtttaaactattcctaatttactaacgcttaatttatactgaatcagattcattactcctctattaaacttataaaagctataaatatttacatgctttcattaatttttattttgaaatctaatgttttatttgtttgacctgtttctaaaatatctaagacatctcgtttgaatatcagttttaggtttttaattataaataaagaattaatttttataaattcaaattctacatttaattattaagcatgtaacataccaagataatatcttctattcatgaatatcttcctattatttattttaggctttattgtttttatacattttgtgttcactttttagaagtttttcacttcaaaagaacaattctacaaaaacttcatttagtcatttcattttaattttattgagtcaaaactattaagaattttgtgtctataactgtccacaacaagaaactctatttcgcttcatccacataaaaacatgatactatatcagaaaactttattattttcttgaatcgaagagactacattataaataaacagtgttattatgtcttgctttttacattcattttccaattaataccacatgaaattaataacacaaaatttcttatattgataattaccaaaaaccgctaccggttaaatataataattgttataatatattatattgataaaaagttaaaggagtgaaaaagtggtatgtttagcgaattatctattgaaaccataagtaaattttccccagtcatcgtggcacttctaggtgcaattacagctgctttcatatacattattaatcaatttattaatgtaataaccacaagcccgcttgataattattttaaagataaatctaatcaatttaaactgaaattttggttttataccatcggtatacttatgggaaccattgtgtattttatttatggcattcttctttatccagctttacatgaatatcgtaattctagcttattcattttaaatgcactaatatgtttctctttatttatatatttttctatcacactcataccaataaaattatttaaaagaattattaaaaccaaatggcatttcaatttatttatttttcatgtattaactagtatattatttttctcctcagcttcatggggatatattgtaaatgaaaagtatttagatttcttatggaatatgccacttgttgcttttctattcagcttattttatttctttacacttcacaaaattactacagctaaagctaccaaatatgaatatgatatttgtcccattactgaggaaacatttagagagatagataacttaaaatacgactatcagatggatgagaatagattagtcttctacaatgaattagaatcaagcgaaaaaatattttacgtatatgattcttcttcgaaactttatatggagtgtaaaaaattagttaaaacagagataacgtctgaacccaaaaaagtccctaagaatcgcaggactaaaatcacaattaatatagaaaaaaactctatatgactaaagaaagccgcaattttagaatcgcggctttcttatttctaattgtctattataataaaagaaatatttatactactatcggcatatattcctaccatattttatatcatcacaaaccattatttaaaattccaatttcttatttttcttcaccaataatacagtccacagtagaatgggtattgtatcaatttttgattttatcaaacttccacttcaataattccttcgaaggccactctttttgctgtattggcaatctaattttttctctgtttatactagagtcttcataattaagaagaatagttccatcttcacagattttcaagtctccacggtcaaatgctatttcatgattcgtacataaacaaatgccattttcaatgacttcctctcctccttttgcagcatctttaatatgagctgcacgtaaaaaaataggattagattggccacaaaccgcacattgattctcatacgcagctaatacttttttacgaaaagctttctgattccccctataaactttcttatatttcgtttcgatccattcttttccattgtaaggcatttttttacgaatttcagattctgtaggaaatttaatgtcaccattttgatcatatacagctattggaatcgttgaaaaacgatccattgacatatctaataaagcaaaaccaatttctggtcccaaataaactcgagttctaacttcatcaacaacattatgtatcatcaggtactcaatagggaaattatatccatcagggcaagaagctaagattgatggctcaatatattggtttcttttttctcttttcgctgcattattgaactctattaagagtctttttggtaaaaattttatacctcgtttcatatttctcctccttattaacttgcagtttagattggcacaacatactattgaaaatgattctaactaagttgtttttcggtagtggaaaaaatcaacaatctattctaaagaaaataaaaaactaattttcacttaataagtataagttcacttatttttatatcctaaaatccaatatcgtaatattgtttaggcatccatccagaacctttaatagacgatgcataatcaaaaattgttttaaaaaaacccgcactcaccttactatattacccttttttcatgataattgtttccttaagaggatggttactttcaattagatattcattccgtttatttagccgctctaacagagcttcatgcggtgctctaataaatttaccattatgttcgtccctattacatttttgacaagttaatactagattccatacaccattcaaatccatgtcttcagttgataaatattgcacagagagcgatataaaacgggtgatgtattatcgggaatattataacaatatcttcagaagctaattacaacaatctatgtttaaataatatattcagtttaaaacattttatattttgattgattaacccgtccaatcttacatgatataaaaattttaaactattaactacgttatgtttgttgtaaaaccattagtattacttatccattagaacaattgtttaaaaatataaactttctctttgactaatataatcgaaaaatttaatatttatatataaatatatacaggaggaattattttgagaaaaagattacatcgcaaacgtttaacattactttctaagacaaggaaatttgatcgttcgccttcaagagtagaagaaagtaaggattcatctatatttttgacccaagctgccattatagtgctattgttaacttttttatcttattcatttgccgctctttttaaaggtggatatcatcagtattttcacttaaattcgctagcctttcttaagtgtgacacaaatgacttaatacatttctttttaggtattttctcatacatagctggagctttattttggtattttgttattcttttcagctgggttttaccattcaaattcacactaccttcaaaggcattatacaaccaaatacattctacaatcattatattaatagctatgtatatttcgctttcattaatatttgacttacaaaaccattggggtacacaatttttattttttggttctttaatgatctttgctttctatggtcttttacctaaaaagattcaaaatgtactaaggcatatcgctacgcctttacattcttataaatatttaacacttattaccctattcatattttttggactctcagcccaccaattaggaataaaaactgcaaaagagcaaaaaatttatttaacatttaccaaagacaatatgaattacgtggtgattagtaataacgataataatttaatatcagctcctcttaacccagattctactattcgcccttattttaaagtatattcccaaaccgagaatatactttttaaaagcgtcatatttcctaatggaataaaagttgaaacacccgcaaaaatgaagtagtttaaagaggttccaaattctattctaagaaagaatttggaacctttttaaataatttaatagagattgaatattttttaatccatctaaaaattaccaatataaatgtgatcaagtacttcatttttatttaaataaactttcgttactgaataataagaaatattcaactcacaaatagaaaataactttaattaatactgtccaattgatggagataagaccattcacaacttttttaaaatatataggaatattaatttaaataaaccctattataaataaattcaaaataacccctttacctatttttatgttcctatctttcaaattgaagatctaattgttcttttatgaaatcattatattcttttatttccactaataaactttctattttcattatttgttcattattaccaaactttttaattagttttactcccatggatatatattttggcagctctaccatataactattcttcatacttgaaacgtggaaaccctcaatagcactaaaaatatattcaaataaattgtttttacctaatagaaacagtccaatatttccagctccatttttttcaatatattgtccccactctacttctgtcttaggagaatgatactgatcaaaatattcttgtaatattttatcacttaaatattgagtagatgcaacaaatacatgaattaaaatttccttgtcttttactattttttcactgtttatatcactaaaataataatttaaaaattcttcaaaatcttcttttgtatcaatccaatttttaactttcttttttatgccttcttgatcactaaagtctttccatttagaaaaaacttctttagcatcaatttcatcaaacactttaaaataactaacttcagaaattttttcatatgcatttttaattgctaactttaaaattttcaaattataattattatgtaaataattataaatctttaacatgaatagaatattggaattttcccaatactctacaggaatttcgcgccctttcgaatatattttttttgctatcaactgcgctaagtaaattatactttctttggcgtttctattcccacttatattatgtaattcttggtatgatttcaaaagaagtgtaaatattttttctatacactcatctacctccgacaatctatgttccaacttctcatttacttctttagcactatattcttttattaaatctaaatatattgtttgtatttcagttagatctttttctttaatcaaactaatgaaattacttaattcattttgagaaatagcatctctagggctactatacataaaataatggttaaaatacttgtctgagcaaaccctcttttccttttcccattcttttttatttgccatttctccttcaaatgcacctccaaatagacgtgttgcataagggaaaattgtgcatagtatcccctgatattcatttaatctgggtaacgctttaaattcatcgtctaattcaaacttgtaattatttataaacaataatttattagtatatatatattgatacaattccggtgaactaacttgaattaagattaaatacagtaaatccttaacgttcacttcttcttttaaaaatggtaaataaaacttcaccaaattaaagtatctagataggtctcttaatgacaatttttgctctattaagctatctataatttcagtatattcctcatttaaaatattattttcctcaataatgttatttaattgttttttgcataagttatataaatcaataaaatctggcttcggtaaataaataggtatttgtataaatttctctatatatttttttgcatcttctaaattccctttttcttcaaattgataaactgatgataaagatttttggacaacttcctcatctaaagctaatatataagttacctttggaaaatcagctaccaaacgtactagcttaaaaatcattctaatttctgacccctctagtcgatcaatatcatcaatatatacgactattctttttggataatctttaagcaacatttcaatttccttttttaaatcagataaactatccgtactctgacctggtttaaatctatctactagttccttaaatgagagtgtcgctccaaaaccacgcaaactaacagaggataagatatcagcatacttttttatcgctttaccaatttcaggattatatccttcaacttttttgattccttccaaaaactccaataagtaaagccgaataatatcatgattattttcaccaaaataccatggtttaaactctataaatattacatgattcttatcacttttctctttaattaaattatatactgaacttttaccacttccccaattacccaaaatccccatcgttaagctgtcttctccacttttaactaatgaattagctattttttctgcaaaagacgctctatttaaagcatcctgctctgtatcatttatcggatattcagagttgtaataggcttctattttgttttctttttgaagacttttggctattttctctttcttctcttgtttagatttttgtattcgcgctaaaatttcaccagtaaaatataaaattatgcaacatgaaaaaaccatgcttatatcgaacaaatctgaaagaacatttcctgtccacatgctaacaggtgtgtttacaaaccaataatttattattatgctcaatgatacggtgaatataatataatcagatagcctaaaaaatgtttctcttctgattctagcattagaaatactagtaataatatatgaaacaaaaaatagtattaatggtatggtaataagaacatataatactccctttacccaaaaacttaagtaatctgacggaattttatcatgcatttcatttctcaatattgtcaaaaaaatatttatacatataaatgataaaattacactggatactctccaactatttttaattattttttttgtattactttcttcttccattataaaagctcctcttttatatgcttaccaagtagtttttcttatttccttggattcctctctcccttgtttttataaaatacatagggtaataattaagtgtttataataagagacatacaatcactaataaagtattttattatttattaagtactcctcatgcaaaaaccaaaggggaatttcaccataggtattatacaacacttgtattctatactttttaacaccttcaacatttcattacaaataaaaccaagaattaaaaattctttaatatatctcagaataaatctttctgtttaattaaatatttactatttcaattaccccaaaaagaaggaaatctaattgaggtaatttacaatatttaagtttaatataaagatgactagatgtttgttttatagccaaaattaaatttaaagtagtattaacatgtctaatttaaagtaaactgatatcagattattacaaacgatgtattccgaacaattattgtatccttttactaccaataatctcaaataaactatttcaattcagctaaataattgattgactcaagattaaaatttgcactaatactaccttgataaatttttagttgtggtgtatctgttttcaacccaaatactcgataaatataaaatgcctcagttttttcttctgaaaattgcacttcgctactcgagataggaaatggaatattcgcttcattaattgtaccttttacttcaatatacttctctttcccatcaatctcataagatagaatatcatatccaagaccatcaccttcaatttgagatatgcgatgtactttttccgccaaatgtgaaaatcccatattggtaaggctctctttttcgtattttaatactaattcttcagcagcgtcacctattctccctttaacatctgcttcagcgacataatctcgcttaacaccatatcgatttcgaatagatgatcctctctttattattttattagctgatatatcagaatctgtacttagctcaagttttttcccttctactactaaatcattatcagtaatttttatggaagtaattgagctttcatattggtcatttaaagaaacataaagtaaagcctgcattccttttacattcaaaataggtacttgtttatcataatgataaatatgttcgatattatttgtaagtgaaataggccttaaccctttaatgtgaaaatacgaatagattatcattggatttttagctgttatatgagtaacccctgctagatgtcgataatactcagggattaattttacaaattctggttgagcagcaccggcataatctctatcatatattcccacaagttcagcttcgtataataatttagctttacggctatagaagattactctggtggtcatattgttagctaattgttgttcaatgtcttgcttgtgcttcaatgagatacccgcttgatctcgacttgtaaattgcccccaaatcagttccccattattgtttaaaccagtaatttcatgttgtctgatcgtactaacaaccttaggaaatccttcattaacatcattgaatttaatgaataaatgtttaacaggtttttgaccatcgttttttttcattatttttcctcctcatctactttttgtataccaccttctatatcactcactatactctttttaaattcccaacgcaactcttttattaaaaaataaaaatctctttataaaaaataaatacagataaactaataaaacccaataaaataaacgtttttaataaaatctgttattttaaaaataacatttcccataaactataaaacaaaaatcctttaccgcaattatattcaaaacatcgtagaatctccttcttaaactaaaataaatgctaacagaatatcaaacgaatataagggaatttttatatctttaattcagttgaatttttaatatagataaaaatactcaaaaggggttgggattagtatagtagactcgttcattttaaatgtgaagacttatctaggtgtcaaagataaattacattcgctcttacaactggattttttgtgaaaaaaatatagatttgattatgattattttaaaaaataatattcctgagaaacataaggtaagtttattatcactgagaatatttggagaaccaaaggatagtctacacgaaaaccattacaaaccgtttcattcgtaataaaacagttatgagcgtatataaatctgcgcttataataaccattagatcttttaatttttcatatacgattttataaatccctcaattcaataaattcaaaatacttaaatctttttattcaatacgaatctgcaattcttctcaaataaaatagctgcaggatggatttccccttcatgtaaactttaaaaatcactttatttggaacgataacacaagcgagtacgaacttttcacatcatccccagaatataaattcattatttttattgatacaatatatagatcgtcagttttaactatatagttgagaaggaatgcctaaaaaaagaaggaggatcatgatgaaatatcaaaccttatttcccttattaaaaaaatctctttttatctttatcctttctttcagtatgttaattttcacactccctccctctaccattgcacaatccaataacaatgtaatttctgttacaaattactatgtatctccaacaggaaatgacctcaatcccggtacattagatcaaccttttgctaccattcaaaaggctgctaacgtcactaaagaagaaagtactatctacataagaggcggagtttataaccaaaaggttcgtgtcactcgttctggtgtctcaggcgcacccattacttttcaaaattaccaggatgaaaaagtcattctcgatgattctaaggtcaaattagaagatgatggattatttacaatagaagacaaaaattatattcaagtaaagggattagaccctatacatacaaagttagcagtagtcggtgatgtaaatagaagcggttcaatcgttctagccgcaactccacccttaaaagcattgggtgtaaagaagaatgtatggtttggtatttaagaatgtaaatcagactgtatttggtactatggaacattatcccttatatttttcattcctactgctacttatgttatttctaaattaatatgttcataattaaaaaagagggtgctcgcagctccctctttttttagataattaaatatgctctccatgatccataaacacttcaatagtttcattttgtgatacgtcttttacattagtaagaccaaaagtaaaaacagcggataacatcatcattaataagattgcttttttcattttagcgcccttctttctatactctttttgtctgcatctaaagcgatgtgtaaatacttgctggctttttcgtgattttctgaaccatagaatatattacctaaaagataagcatattcttttacccaatcatataattcttctttttcaaaatacgaaataccttccatgaccaccttttctaattcttcttgtggtgcatagttatgtactgcttttaaaatttgaaaatgatgacgataacataagtcactaatcttatagccattctcaatatattcattagcattatgattatgacctaacttaaaatgttctcttgctaaaagaaacatcgttttagcgttgttttctagtgattcctctaaatgcttaattgctaactctgacatgttttgacttgcatataaaagtcctaaattatgcttgactcgtttaataagaagttcatcattagatttttggaaggtacctagtgctgaaagtaaatattcctctgcactttcgaattcatttagtcgaatgtgtgccatccctaaagtatttaagcatgctgcagtttttaattcataccctggactaattgaaaatacttcattcgcctttgtagccaattgaactgctaggattggtttcaatatgtgatagtaatgaactgcaagccaataattaaattcagctttttcgatttcatcatgcatgtactctaaatatttttcagcttcttcaaattgcattcttgcttcactatggtttgctgtattagtagcataaattgctttaaataaatgatgatagtactctaaaaatgtttctgtaggctcttgtaacggctcaattttatccaaaatatcttttgaactatccatatcacgaattagcagattataccgtgcattcaataaagcatagtagactaatattgtttggtcttccttaatattattgattttatctgcaatctcttcttttatttcattagactgtaatacactttgtgaaattatagcttgataccagtcgtttaataattttgtgatttcttctttagaaataatttcaacattcatatacgctacccccttttattaaaggttaccataacatacttgtttatataaattattttccgaatattaaaacttgataaattttttcagacactcatattaaacaatgttaatttcagatttattgaaccacccccactttaaataaatatctgttaatcttaccaatcaaattagtacaacagttaacatgatacacagggaaactttaattgaatagaaaacatattttgaataactctccttaaaattagtatcagtatctctcattccctcgtctaccgattttaatatccatatttctttaagtacacgtatatatgatttgattttatacgaaaaaccatgaattattaaaaatttagtttcagatagaagacgtagaccataggagttgatgtcccttaacccacaatacattcctgtttttttattgatacaagatataaatcgtcagttttaactatatagttgagaaggaatgcttaataaagaaggaggatcatgatgaaatatcaaacaatatttccctcattaaaaaaatcgctttttatctttatactttctttcagtatgttaattttcgcactccctacctctacctttgcacaatccaatagcaatggaatttctgttacaaattactatgtatctccaacaggaaatgacctcaatcccggcacattagatcaacctttcgctaccattcaaaaagctgctaatgtcgcaacagaaggaagtacaatctacataagaggcggagtttataaccaaaaagttcgtgtcgctcattctggtgcctcaggcgcacccattacttttcaaagttatcaagatgaaaaagtcattctcgatggttctaaagtcaagttagaagatgatgggttatttacaatagaagacaaaaactatattcaagtaaaaggattagaatttcgtaacttaaagtcaacgaaagttaacgaaacccctattggtatttatatcactggaaaaggaagttacattgatattagaaataattatatccatcacattgaagcgaatgtaaagaatggaaatgcacatggcattgctgtatacggtacttcatctagtgcacaaaataatttaaatcatattgtcattgataataacgaagtagcaaatttgaaattaggattgagtgaagcaattgctgtgaatggaaatgtagattcttttgaagttaccaataacaaagtgcatgataacaacaatattggaattgtactgattggacatgaaggcgtatctccagtagctgctttagatcaggcacgaaatggagttgttcgtaataacattgtccatcacaattcatccatcaataatactagttataatgaatattcagctgatggtatttatgtggatggtgggaagcaaattatccttgagcaaaatcaaagctatgaaaatgatctcggtattgaagtagctagcgaacatgcaggaaaaagcgcaagccgtattactgttagggacaatacaatatccaataatatcatgagtggcattgcaattggtggatatgatagtcagcaaggatatgctgaaaataatacgattacgaacaatgtgatttataaaaatgatacaaaagatcaagagagtggccaaatcgaattaaattacgatacccggaacaatgtaattaccaataaccaaatctatgcaggtaatagccgtatttttattaacaataattttaataaaaacactgggaacaaactggattacaatcattactatggtgaattcgatcaaagtaatggcttatggcaatggaaaagaaaaacgtataaaggctttacatcttatcaagcaggtatgaatcaagaaggaaatgaacaacatagtgtatttatcaaattaccctcttccctcaaactacttttaaaataaagcaaatgtactaaaacaattttattccagctcacttcatctcccctctcctataaaagtgaaattaaaattaaaagttgtagtttcaattaaaactacaacttttccgtacttatatatgaaattgaaaatatacacgtgtatttattccaaaaatgaaaagtgttttgggggcgtattatatcacaaatgatgtagaaaaaatcatctcctcaaatccatataactacgaatgattcttattcattaaacttaattaataggtatatacttcttaaaccccttacttatagttccattataaccatttttatcgaaaaatttatgtgcttctgttctagttgcactacttaataagataattcttgtagattcccttgcaattgacatctgctctacatgctccaataatttcctccctattcctttgcctcgaaaatcttcatttacaaccacatactctaaaacggtatatggtctaaattgatatccagggtccagacaaaaagtcataaaaatacttcctataacgttacaattttcctcataaacaaacaaaaaattattagaatcctttcttatttgttcaattctttctggtaaaatcttaatgtttttactatggggtgctaatttcttatatagatttccaattacattactgtcctttggctcagcttcacgaatcatataatcacctatctttctaataatattgacgtatcaacagttgttatctcagtatcttcaagaacatcatgtaaataagcagtagctttctcttcggccgtatttacaaagctagcaactgcctcaggatgtttgatatagtccacacccgctttatctacttgtccaccatgtgcttttttagctatctcatgagctatctttatataatcagataacatcgcaaaatctccctttcttcaaacaaaatcttcccctctagcaagctgttctaaaagtgaaggaggaaaatattgatataatccctcagcaaatcattggagttcatcttgaaacaaaaaatttataaaaaatgccatcctctctgtatatttctacaaaaagaatagctttttttggttatacggatacaattttattttaattacgcccttttcctttacgggtatatactgtattaatgaagaaaattagtccgcagataaagaatagaaaaggatgcacccatgttctaaaattaacaagacttataataagcattataatgcaaaggatacaacctataatatcaatgctaaaagataacttcctctgttaattctttaacttcattcatttttacaccataatccattaatttctttgactaaattgctgcataaaatacaattttgtttttacatctttaaaccaaatatacaaaccttttttacctctagataaaagcactctgtatatgttcattactaattcacttacaacatttgttgcgttcacattttctacaaaattatcgatttgatattgttgtccattataaatgactgttctattatatttattaaatgtaccaccataagctcttgctatttcatttataaacgaattgtcgtaattatcctttaatgtgactttccatagcttacttgtagaatcgtaatatagatcatcccaaaagattagacctacataatcaaactccaagccttgagccgtataaatacatcctacttgctctaaatgattaacagctgtttgtttataccattcatattgcgcagctaacgtcggattccatgcttttacaaattgggtctgtccatcccaaatacgaatatcatcaattttcttcttccaatcccaacaaaacggagccagccattttacactatatccttgtgtcattttatctttaagtacagtatcaatgtcatgtaatgaatcaaatacttgtaaatcatattttttcaaatctacactcttagataagtctcctgttaaaaattcatctacattctgaatgaatgtaccgctattttttgctcgttgctgagtttgcagtgaaagtatttcgggagtataccctaaagctctacgaatattatcgactgtgccttgttcagtaatttttatacgctgattatcatcctgtagtagaacaataatttggaatcttgaacatagattgctcattacatcttgaacatctgttaatcgatgtgactcatctattacaacaatatgtcctctatttcttaactttaatattgcgttaaccgttggcaatttagctggttcatctaatccatgttccatagcatgatctttatttagtccatcaataactgttctaagtgtttgaggaattgtaccaaaataagtgaacggatacctttttatgtattgtcgaatgagttctaaacctaatattgtcttacctgtgcctgcattaccttgaatgactagcactagcttatggttgttttgaaaagcatgtttaataagctccatcgctttaattttcacatctcgttgttcatctaaaagtgctacaaatcgctctccttgtaatgctttagaaatacctgcaagactagcttcactcattgaatagataccattagtaaataactcattgtcctgctttgcaacaggtttgttcacaaatgattcttttaagaacgagcataatttcttctcttcatctttgccaaaacaacatctcaaatagtttgcttcataaatggtatggggtggctcaaatagccgatttttttcagttaagttcggtaaataactcattgtacttaattgaatagcatttttcttttgaagttcactatgataacatctcagagacgttacatagtgatttaactgtgctgctggatgctgtcggattggttgtcgacttacaccaatatcaacatggtgtggatcgggtgaaccaatgatttttccccattcctttaattcaacaatcattacatgtaattgcgattgagaattatagccaattaaaaccgcatcaagtcttaatagatttccaggaataaaatattctaatacgattgatatttctccaagatctccttcattaagtcgctgcacaagtttttggacagaaattccccaagtgtccacttcttgctcactaaactcttctttagcaaaagcatttgactttaatccttctattaataaatcctttatttcatttggagttaatctaaataattgctttacttgcccaaaatacaaatgcattatagatctcctagtcgttagtcaaatttggtatttgttctaataatactatccaccttttttaaagatataatcatttattatatatagattatagagatataaagtactatttagataatttgttcattaccactttcttaattgcccatacatttcatctaactgagcttcaccttacaaatctcttgaagattcattaatccattctttcaattaagatttataaatgcaggttgtctacatttataaatcttagaagttaatgtattcatctatcctaaaatccaatatcgtagtattttttaggcacccattcagaacctttaatagaagaagcataattaaaagttgcttttaaaaattctgctcttagcttactattctttcccgttttcatgatgattgtttctttaagcggatgattactttcaattagatattcattacgcttatataagcgttctaacaaagattcatgtggtactctagcaaatttgccattgtgttcccccctattacattcttgacaagttaatacaagattccatacaccatttaaatccatatccaccgtggataaatattgaacagagagcggtaaaaaatgatctacatcacaggtatttggttgaccactctcaatagaaatacttttataacaataaaaacattttcctttttgatacccatttagcggttttcttacaaacgttaaatttacacgttcgtgagagtgtaaatacctctctggtgtaatagacttcaaaaagaagaattgctcaagctccccatcgaatctaacttctaactttggatttctttccgtccaagcactttctactaagttccatctaccttcaatctcattgaacaaattcgctctttgttcactttcattcaagatataaatactatcagttaatgtgatacctaacgtttttccctgaacagacttttcatagaacactgtattaagctccccattaggaatgttatgaaaagcatctattacattattgaatcctactttttcagtaacttgcaacaactgttcccatgtaattttctgtttattatacaattctagcgcattaataaacttggatgatgcactagtaatttgccttttgccattcccaatatgctctaacatatacttagcaaatatcggcgacaactcctcatggcttacaaaactattattactattccctagctctaatagtgtctttgcaaaagcaaatttatatgtagctacatttcttccaaacaagtaaacagatcgaaatttagattctaatgtttggtcattctcaaggaaattattcatgcaatgcccccttagtaattattagtcctgtacatcaataaggtagatagctttctcaaaaccacctcgcttttcttttttctccttacgaatcacttccaactcttcaagctttactccataagctcccaatgaagcatgaattaattctaaaatatctgcaagttcttcaacagcttcctttttctcaacagcttccttaaactcatgtgcttcctctatcatttttgtttttatttccattagtaactcatcaggtgtgagtattcttgcgttgtagcttagaccctcggctttgataatttctaaaatattatctcttactaatttgttatagataggcatgtttactctcctttatatatattaattatttaaagtaatcgtatcatgataattgccccatccaccacataaaagagcatgctactatatttaatcattctggaggaactttaaagattaatgattatgtttctcttattgaagaagatgcttctgaaggcaaaaaattttatattgtagacgagatcaaatcataactaatgataaatacaaacctttttgtttatcgacacagcatataaagatttacgaagactttggaatcgtaaaaagatgattagctgactatcctcctgcagactttggtcctctactaagtgcacattatgattatctaaagacatatgaaaaaatacgatgaattacaaggggttttatacactctttcctttcacgaatcacaaaattgcacagaaacacagactaccattcaaaataaattaaaggaattaaaaaagaaaattgatacaaaaacacaatgcctttctttcaagaaaaataaaaagaccgaaattggtctttttattcttcctcaccgaaaaacttgataaatctttttccaaaattactcaatttatatttttctatatttatttcatatttatcaggtacaggagactgccactgataaggcatacctgtttgtatgtaatcatcctgaaatggttcgtcaacccgctcctttacatattggaggattccaagcctaaataacttattatccatgtacctctttaaatcttccctttctttttctgcttctttttcttcttccgtgtagtccatttttaattgaatatttaacttcatcttttccggatttttcatcatttccattgggacaacatatttttcagtaaggtgaacaatctcacttaacctcatttcagctaagacatcatagtaatgaaatattttatcaaaatctagaatatcattatcaattatgtattcgaagccattcaatataatctttatcttttctgcttgttcatcattcattattctattaagaacaatagggaagacttcctgtttcaaaaatacttcattttcactttgatctaactttcctgcaattttttctatttttccttttagattatttaattctttatttatctttttaaatttaaaatgattcaatatggacccaatgacaggagcagctccaccaccgatttcaaccacctcttgcacaggttcttgcaatgaatctggtaaattttcacacattatatttattaattcttttatatccataaacgaacctcctaaatatccattcaattattaatataatcatatagtatttcaattcaaataaaaagaacgctataagccgattaatttaaaaataattcttccaatagcaattttcattttccatattaagaaaaattagaattcactccgtcttgaatctttgatactcttaaacatttaatttagactaatattttaaatccaatacagagcttttccagtctcctaaaagctattctttattctcttcaatatggtaacttattgttattaaattcaatacgtttatgtaatccagaatttagtttattttcattaattccactacttgaaaattcccccatcacctcttgatacgctgagaattcctcagaccgcttataatctgagtgatcacaaatattttctagtgatctataaacatatcctctaatcttatcctctgggatatttttatatcttacattttcaattgtttcttctgcaaatttttttataaatctgtttcattgcttttattccatctaccaacagtaaattgagtataaaattcattagcttcattaaagacttaaattgattaaattccaatgatttggtaattgttccttgataattatcaaaattatctttgttcttttttatttctctttttaatagttgatcccttttgtacaggcttgctgttatctttgtataaacctagggtttcccttttggaaaggctggattcactttcttgctttgctgtctctggatttgtttatgtaaaaaataaaattcacaaacaaaaaatcatcagaattcccaaggggcttgctgttacattctatcaactttaaatacaaatatattaaccacactcttaaaaattgatacaaaacaatctgagaacccattttttgataagtgagataaaatcaatattttatttaatcaaaacaaaaggaccatttaggtcctttttgttataaataaaaattaaccatttttactaattcatgaacatcaaagtctatttcagtcggtaaatatttactattatgtacaataatatttaaaaaaaatactggatatttttatttaatcttataaataaaaagcacctctaatatataggaactttttattgatttaatctataaattctttttaacagaacatttcttctcattttcaagttcgtcaatacacatatcgattacctcttgtattattctaaccctagttttatcagtatgactcataagatatgcaatcataataccaatgataaagaatactaaagcagtacctagtccataatagaatacttgagaaagtccactatccatttttggaaggaggtattttgtaacgtcaacaattcttcctgttactaccatactagcaaatgcggatgataatattgcgaatataaatgtttgaaatactagcactgtactatctttttccactacatttaaatatgctctaaatctttttaatttatttatatctctatgaaaatatcgttgtattcgttttttaataataccaatattatcaataatatcttttgaaacaatagaatttcctattattaattgcaattcagcttcaatatcttgtattccccctgtccatgcaaataactccatttcttttgttttcttatttaaaatttttttacgtatccatttgattgtctttactagaaaattagctattattatgtccaataaaagactaatgatgcagtataaaattagtctaatataattaatcccatttcctataaatcctcttaaagggtctaaaaaaacagagaatactattagtattacaaacaaaacaaatgtgactaaacacagttttttcatcattaaaacacacttcctatatattttaaaaatatatatttatatataacatataacaaatacataaatataatcaatatttctttccgctaaaaaatcgtttaaaatagaccaaattcgtctctatataaagcgaagatccttttctactatgctattcaagtacttccgttacctaagttgcatcccaacatttatactttttcttttttaagctgttcgattgctataaaataagttgaattcttatcgattgtaataatacaaagctttgaaacacaatactttaggaaaaatatattttaactcttttcttattccaaactatttattttattttgtataatatagatattcatatataaaaccatattacaaggaggcctttatcttgaactatggctggactggaactattgaacaatttaagcaattagatgtacagttttttattaaacaattgttagctcatgtttataaaaacaatacaaatgatccaaaaatagattctcaaaagagagcatggatggatagttataataaactacaagatttatttaatcgattttctaatttagatgcatcacttatttttgaatatgagattttacgcggaggcggtcgtcgcccagatgtacttttactgatcaatggttatctgatagtcctcgaatgtaaaagttataatagcgtttcaccttctgaatatatccaaacatctctttatatgcgtgatcttgaacattatcactcagctattcaacaatctaacatgcaagtcataggtgttttactgcttacaaactatgaaggcgaacgctggattttccaaaaagagtatcaagtaactctttcaacagttgatggattggaaagtattattaaacgaatattaaataaaacagaaacaccaactttaacgctagaggaagtaatcaatggtgtctatgaaccctcaccttctatgctagaagctgctcgttctattttaaataatgaaccgctccctgacattaaagctgtatcaagcagtaactttccagaagtacaacaaactgtacgctcaattattgaagaagctcaacgtacaaatacccatcatctcattttagtatctggtgagccgggagcaggtaaaacatatttaggtctgatcattgcacacgagatgaaaaatacagtttatttatctggtaatggaccattagtagacgtattacaagacacgctgaaaaatagaaccttcgtacaaggtctatatggatataaaatggatttccttgaaaagagaatgattccaaaagaacaaataatcatttttgatgaggcccaacgagcatgggatgcaaaaaaagtcgaccaatcactcactcgaagaaatcgagaacctcaaaacttaagcgaaccggatattataatgaatgtcacaacaaataataagccgtggagtgtaacaattggtttaattggtgacggacaagagatctattctggtgaagaaggcggtctcgctctatggaatactgcgatcgctggaaaaaacgtgactgttcactctaaacatcctaattctttatttacaaatgcagcacattatagaactcattctcagctacatttaaactcatctttccgtgctcatgcagctttaaaatactataaaattattaataccttattagatgctaattttgaacaaacaaaacagcttattcataagctaccaaaagaacattatcaactttttattacgcgtgatttagccaaagccaaacacactttacatcagctttatcaggatgatacaaaaacagttggcgttgtctgtgctggtggcgctgatcatcaaaaagaagtccctgttctaccaagagatgaacgatatgaacgccctagtaagatcgctcaatactttaactatgccgaatcccaatactattgtagagcgctcaactacagctcaactgaattccaaacacagggtcttgaactagatatgacgcttgttcattgggatgatgatctatatctacaaaatgggaattggaaggggcaacactatcaatggggtgttgaagatccattccaaattaaactcaatgcatatagagttattttaacaagaggtcgggatggaacaattatttacataccaccaaaacccattctagatgagacttgggacttattaaaaaaccatttacatattcctgaattaacgttttaaggcttataataagagacgatattctagactcctttagaatatcgtctcttatttttttattttataacaaccagagaattgttcttacatgccttaaaacattgcaagaaggagtttctttaaacaactagtattataagaaattgtcacttaagaagttgctgtttcttttattcccctaaatactgaatcgctttgcgatacttctccaatcgttttaggtctttatctgttatcctagcaagtcttgagcgatcagaattatgttttaagtctgcaagtttaactgtacgggcaagagaattttctttcactctgcacaaatactcaaaataaggtgtgtatttctcttttgtcagtacctgcactgcctcaactacgttatgaggtataccagcacttaacagatcattagcagttatctctgtatcttccagaacatcatgcaaataagcagtagccttctcttcgttcgtatttacaaagctagcaaccgcctcagggtgtttgatataatccatacctgctttatctacttgtccagcatgggcttttttggctatctcatgagctatctttatataatcaggtaacatcgcaaaatctccctttctttaaacaaaatctccctctctagccagctattctaaaagtgaaggaggaaaatattgatataatcccttagcaaatcattggaattcatcttgaaacaaaaaatttataaaaaatgccatcctctctgtatatttctacaaaaagaatagcgttttttggttatacggatacatttttattttaatttgaattacacccttttctcttacgggtatttactatattaatgaagaaaattagtccgaagataaggaataaaaatgggtgtacccatgttctaaaattaacaagacttataataaacattataatgcaaaggatacaacctataatatcaatgctaaaagataacttcccctttatttttttcatttataactattcccttccagatgccacctttaatttataattctcaatataataataacatacgtttcgatttttaactttttacatttaattacttttttggttctggtgcaacaaatacctttattgtgtgcaccagggtagcaagatagcaattaccgatgaaattaaaagtaaatctgaacaggttgaagaatccattacaaaaaagctaacgaagcaaaaataaacaacatatagatttgaattatatttctcaacaaccaaaattacttaatgtggtaaaataataattggattggcatccaataccatactacgttggttcaagtcgcagaaaggcaccttagggtgtcttttttttgtttgaaacacattctgccaaaatacctgtatcttttttgaattacgactcatataatccaacaaacttcgtatatataatttgttaccctaaatgggttgacaatacgaacagttataggaggattttgtgaatggtaaaaacagcatgtgtaagtatgattactggcattcttttaatatgttcaacaggatgtgccactcaaactgattctattacaactaaaactcaatcagtagatgatggcgcatatacaacaaaagaaatcacagacgcatttcctgtaggaacccccataactacttacattcaaaaagaagataaactgaacgtaaaacatatcaccagtattacacttacagatggtggcgtcggtagagttttggaagcaacagatggttttgttgttgtatgtgggaatgaaaaaggagtttttgatgtgttaacatttaaaactctggaagatgtaaagaaatatgaacagagtttaaagcgataattaatatcctccttatgccttttacacagacattgtcctcttgctcttgctatggccttttctaagtacagtataattgcgtcatgaatacacacacgttataatagtcacctaattacatattaagaggtgcagaaaatgaataaaactgaattaacaaaagtagtagcagaaaaagctgaacttacacaaaaagatgctgcagcagcaacacaagcattattagatacaataacaaatgcgttagcaactggagagaaagtacagattcttggttttggtacatttgaaatacgtgaaagatctgcacgtacaggacgtaacccacaaacaggtgaagaaatgcaaatcgcggcttcaaaagcacctgcttttaaagctggaaaagaatttaaagaggcagtgaaataattacacatagtcaaaaggctttccacaccccagctttgccccctacccttcgcatatcctgttttggctagctaatctggtttgttaaggggggaaaagagaaggagggcaaaaaaaagaatcctttaaaaatcaggattcttttttttgaagtatcgcctattgtaaagtatttttataagaatgtgtagtagaaggttatagcaaatccgattaaaaagagtaatgatacgaggagataaactctttttttgttatcttttgctattattttatctagtgtattgaactacccccactttcacttcgtttagaagtgagggattcctaagtaaagagttctatcgaactctaattgattaggctaaccccgcagtccttgcggttagaagccttatcgcttcatgctttagattgatacttgcgttaatatccctatcatggtgtgtacgacaagaaggagaaaatgtacatatttattcaagcgttaatgtacatatttaagttagcatttatagacatcagaaaaaaatggaacactcaattacttgtaaagtataaattacgaggattactcaaacatagatacgaaaatagcccttttaaagcaataaatgatttatacccaagtgagtttaaagaatgggagtttggtatgactcctttaaatttttggacgaaagaaaaggcattaacgattttgagatggatgattgaagaaaaaaaagggttatcgaacgaaaagctcttacgcgtatacggcaaaaaatggttggagaaaaacaaacttagtgcccctctggctatgtactggaatagtagtccgtttgcaatgattaacgatttgtaccctagtcgttttaaagaatgggaatttctcatgacgcccaataacttctggacaaaagaaaaagcattagaagcattgaaatggaccattgaagaaaaagaaaaattaacacccgaacaaatactggatgtatacagtataaagtggctaaagactcacagattagcgtctccatgtcaattaatgtggggaaatagtccatttaaaatgataaacgacttatatccaggtcgctttaaagaatgggaatttaaagttacaccagttggctattggtccaaatgtaaagcactagaagcattaagatggaccattgaagagaaagaaaaactggatgaaaaacagctattaaacgtatttaatcaacgatggctcataaatcaaaaattacggacacccttacaacgctattggaaaggaagcccctacgggatgcttattgctttatatccaaatcgtttttctaaaggtatgttaaaagggtattgtaataattaaagtggaaatgtaagtatgcagagacgccctttggtgtctctttttgaaatcctatgtaagtacattcttatgtgcctatcgctttatttatcgaagaaagtgaacctgttatattatttcccaatccatctcgtcaaagccataccaagaaacccagcgcccatccctatcatccacccagttttggcgcccccaaacatagatcccactcccgcgccaagaaacgtacagcccacgaatactatcccccgatgccccagttcggtcgttccatacttcatccccaccctttctttacaacatatactatatgcaagctaaaatttctagcttatgaactgttcattttctcgaccataactatatgtttcatatccattacttacaggtccaaatgtcatttttacatcaatgcgttacttaacttcattggttactttttttcatcttatagaagattatttctcaacacataacacatggaattatattaccagtaatggtaatataaaggtaccttcaattgttaactgttgttccctttttgaaagtcctgtcaaaagacaggactttttaaatttacttcctactaatttggctttttcgttaatatcctttcaccttgtatttatttgttttgttatctttccttaacaacaaataagacgtcgccaaaatcaaggcagcgcctactataattcctatacatttaatcaaaatcatttatcctcacattatttatttctttgcttccataccctattctctttacgaaaagtattctttccattcatgaagtcagctgtattaccaggaatgctatatttcttattctttttcttagacttcttcttcagccttttctcttcttggatagcttgcaaatccgccttccattgtttcaacaaatccttttcacgtcgcatcgaatttgtaccccttggtttaaaatgtgaaccagataattagattctacctattcatatggatatcctctaatccaatgtaccaagttatgtttttctttttaaatagaccaacaatatattaaaatattctatatatccaaggaggtttgtcatgctcaactttcataaagaattacccctattaggattctttttgtttttatacagttttattggtatcatctttttattactattcctgagcgtgtagtaacaatgcaatgcgtatacatatatgtttaatgtgtaaattctataaaagaagtaaaaagcacctctgctggatgattaatatatactatatattaattaggagaaaacatttggtataatataagtgctttattatatgtgttttcttcaaaacgtcttaggaggaaaacagttttttattttttcaatagtacttactaactatttctgttaatatttagttaccgatatgtgtatcaaccggcctgtgcttctgtacgggcttttttgatgcttttatgcttcgtaatacccaggaacctgtcttagtattcgggaattctactagattcccgaatactaagacaaacaaaagcctgccctattaactctataaagacaccattgcaaacataatcccttatagcttctatagattctcaactttttcataatatttatgagagtttttttatattcatatttctgtaacatctttatataacgttttaatatattatgtgttaaacttaaaacattccaagaagtcctttacttttagaatcgacaattcttcaatacccttagtcttgccctgcatcccctgcagggcttttatcatttagctagaattgataaagccttttgtagatttcttcaaccttatctgtgctgttatttatatctctagctcttaaattctttgtgagccacaagattttcttccgttcatattcatttctctgctatttatccgttattttccatccttaataatccgtttattgatgcgttcaataactttatccttagttagattttcaataataacctctattttcctaaaattcaatcaaatctttataaatttctaatgagtattaattgataggaataccacagcataaaatggaatttattctcaaaagttattaattattctatctgtcaaactattagtttatctcttcttcatattttaattgtcttttgaccacgatcaaacgaataaaatacacaagtaggtaaggagcattaatatgattatacaagaaaaattatctttttcagatctagattcattagattcaactacagactccataatggatgcgtttaaagatctttatggaatacttcctgacgaaattgcattaaataatgagacgtttccaattcataataagcctgctattactgaacgttatggtcatgcttgttataaaatgctgggcccttttatatttcgagatcttgaagaaccttcaataaatgaaataaccctaaaggaacaatttgtatataatcctaataatgaagaaaaagagattgtagtgataataaaagaacaatgggtcaatatacaatcttggagttcgaaatctattacaggtttaactttaaaatcagatcttattattgcaggtaaatttcaatcgggtaatgaatttaatatttcaacttttgcaggagaaagtaattcaaaatcaattcatacctctccttcaattgaacattctattaaagtacctccaaatagtaaaatgaaaattgcaatgataggaacattaattactgaggttctacatttccaatcaattataacagtacaaggcatgtttggtgcatgttttccacgtatggttcgtggacattatgttgggtttaaaagcgccggtcacatcctaaataaaacgtttggaataattgaaggatccattaacaatacagcaattcaggatattgaaataaatattaaagggatagaaccttattcctataaacaaaaagtgatcaagtagtaaagttgcaaagcaaaaaaatatactgttttttgattctatatcatatatagatcattagaataaggaaaatgaaaaatctatggctaacagtacttcaaaatcattgaatgggggaaaatcaattgtcaaacaaaaatgagttaagttttttcattattagattagtattagggttaactttttttgcacatggactcataaaatttcaagatggtattcataatacagaaaatttcttcaacagcctaggaatattcgattggcttgcatatccagtagcaattcttgaactagtgggtggaattttagttattctggggcttggtacacgaattatttcaaccttattttctttacttatagccggtgccattattactgtgaaatttgatcaaggatttataggagggtatgaatttgatttattattattggctgtttctttattttttgtagtaaataacagccaatctatttcattagataaattcctatcgaatcgtaataataaacaacaacaaactctataaacataaagtttctcctcaacacgtaaatctttattttgtgaagaagcttatttatatgaattactcaatttagatccgaaaaaagtaaaaagaatcccttatattttgaaaaagttttttcaaaatataagggatttataatttatttttaaattattgtataaaagaacttcaacttttggttacataaataccttcttatcttttttaaaacgctctgtatgcattttctcagttgttaataccactttctgtggaatcttatataatggtagtttatctttacagaactctcttaatcgctttctaaattcacttacactttcatttgtacttaatttaaccacagccttaaccatttgccctgtgattgcatttttttcaccaacaacagcaacctcctttactccatccattagctgtattacattttcaacttcagctggaaatactttttctccgccaatatttataatctctgattttcttcctaaaattttaatataatctccatctacttccaccatatctcctgtcataagccagccatcttgagtaaatggacttggagcattaatataaccaatcattgtagacattgatttgatctgcaacattccatccactactcttgattcaatattcttatcgcttagtttgatccacaatgaatcattcgatttagattgtgaatataaaactccatattctgacaaaccatacatttgtgtaattttaacatgagggaatatttcgtttattttacttagtgtagcctcaggcataacttctgatccataagaaatggtctgcaaactatttaaattatactttttataaacctcactcagtataagtagatttataaaagttggtgatgcgggtaaagcttgtacttgatgtttctcaatcatgttacatactcgattaggggtacgatcatcaataattaccaaacaccctgagctggaaatgatttggaatagagtattaactcctccaatgtgatcaaataacataaatggtataacacgttttgcactccttgcgacactgtacttcttttgaagtaatgtaaaatcatgtacaattgctttactacttccggttgtaccagatgaaaacaatactaatcctggatgttttaactttttcagttgtaataataaatcattttgaatgtaatccctttgtatattgattatttcaaagcctcccctttcaactttaattacattttctaattcaactatttcatagtattctttcttcttactgtcaaccaatgaatttaatatcggtactacagtacatcctaattcaataagtgctaaaaacattgctatagagtatggagaataatccgcttccaaagagactattgtataatccatctttctatgttcatttaactcccttgtataaatctttatttgatttagaaaccactcatatgtgtaagttttatcctcccaaactatagcttcgcattctttattcatttcaaatctttcaaataaaaaatcaatatgcatacctaacctccttttaaattttctcctttaattttttgttatgttagtgattttaattgttcctggcattctaaaatatacgcaactaatgtttctattgttttaaatgggctattatgttgtgacattgtatctaaattcaccaaatcaactgataaacccaattcatcttctaagccttgttcaatacttaccaataaagataccagccctaacgaatctaaatacccctcccaatcataaagatgtgctttcaagcctttttcaaggtcaattttattttcaagattttcattcacttcttcaacacagcacaatacgatttgaataaccttttctttatttgtatcttccaagtaaatacactcctttttataaatcatctttttactatgaagatttccttccggcaattgtagtagtatataacatgaacactaaatacacttattcttctactaataaagtttgtaagtatacgtagtagccttctctacttctcttaattatcttttccctattaagactgaagactataattatgttgcagaagaaataaaatattttcatgtaagacacactctctattaataatatccatcattatcaaattaaaagattcgagatcacttaagttactatctttttttaataatttaatatgtgcaatcttatatagtctttcccataattgttttatatccattaactcactagtaatattaataaatttatctttaaataactcgttcatgtctataagtaagtcatataaaaaatatctactccatctcatatcaaataaacatttcaaatacaaaggaaacatatttctttgtttataaaaatcttcatttatattttctttaagttcaagagctgcaatcttaccaaaataatatatcttattgtttttttgtataattaaacctcgaacatactcactggatattttttttagtgttctcaaaaaaacatctttaagattttccatgcttattttttcctgtataatcacatcaattgatgagtaagatgaaattctttctataccttttgcttgagccaattcaggtatagcttttcctcctttccaaaaagaatggaactcctccattgatatctcacccataaatttattaggaactggatcttgaacaaatactctatcttctgtaagtttgttaattgcgaggtaatggtctgtaacatatttatctgtatggacgtctatatgactttttataaatttggggttcaaataatcattactatatggtagaaaaaaggtgcttcctaaggcaataaatacttcttgacgattcaaacattcttttatatactgaagccctttttcgaaattagaatatacatgtttctccatacgaaatgtttgattatattctaacaactgtgtatatcttgctacagaaggtaccgatgtgatagtatccatacgatatgctggtatactatataactcttcattcgctattaaactcatgtaactaatgctacccatactttttaatttatcgtgaagaattgggatatagcatgaataataataagggacatcaaaagttggaattaattctttcattttcactacagcactcaccccatatttattttttttacagccctatccagttctcaacagtataattcaactgtaagtccttagtagctttaaattttctatttggaataggttgtcctaatttatccacttcaaagagcctaaatcctcttgaaaacttaaacctgcatgcaaggtcccttggcactttaaaattccctgcaaaacgatttttttctattctatctagtatcatgcctacactcatataaattcgttcaccaactggtgtattttcaggtacttcgactattacagaaacatctacaaattctgataatgtttctattaccttatattttttaggtattccttttacaccttgtgtcacaaaggtaacttcggcttctcctattttcttaggtataattgttccatcccccataacctctaacacatctgggttatcaactaaaaatacaccatctaaaacactcatttcaaaaccactatcgtacgtaacaattggattaattttcactttcattccagttaatccaactacatctcgaccatctaatgtaacattaactatattaccaacatctccaaagaaatatattaatggtagatgcatacgttctccccagtctttctcaaaatgtgcaccatttggatcctgataaaaaattaaatcatctctatatttataaccattttccaataaagtttctgcaatatccctcacatgttttaccaagaaaaaaccttccgcactacctatatccatccatattttcaagtctttttttccttcatacatttcatataattttaattccgaatgatcatcttcaactttcacaaagaatggagataacatcccaattttcccaaacacttcaggattgcggaaaccaatattataagttgataaaccacctgctgatgaccctattagagcagtgttttcagtattagtcaatgttctaaaattttcatcaatgtaaggtttcacctcattgattataaatttttcatataataaacctgagcattctatatgtttatctggtgaaatgaaatgacaaaactcattattttctatgattcttttatgtgctatacctactattattatctcttgaattttaccttcataaattagcatatcagtcgttttgtggacattccatgattcatcattttttactactggttcaaacaagcgctgcccagcatgcatatataatacaggatacttttggtacgaattactttcataaccaggtggcaaatatataaatagtttcctactattctcaagtatttcagaatgaaaattttcaatcgtaatcactttagaagctcgttccatagtaacctccaattttctatttttcactttcattaatacagttcttttctagttttttctttaaaaccgtatcctttattaacttttaatagaatttttcagtataagcttttgttttaactaccagaatgaaattccccaaattttaattacaattgtaaaaaaagtttaagactccaccaagatagttttttctgcagtttgccattttacaactacttctccagttccaaaactcggggtacgatatttatgattctctccgccttcaatcaatagtgtgttattgatctttctaataaatttgaattcaagcaaggtatcagccggaacacttatatcaaaataacccgtaggaaattgatacattatttgattaaaaaatggccctactgctttgcaaggattcatatttcctaatgaatatgtgttccccattataaaaacttcactctctggtatttcatatccattttcaataacaaatcgaatacaaacttgctttgtatttaagacctctatatgtttataaatattactcctagttcctgtatctgttacaacagtaatttcatatttaccatcgtttactgctggaacttttacttttatactagtatgtgaccacgaaacaacttccgcctctttttcttcaaataatactgatccttttttagaagtaaagccacatccttcaatacaaattatttgaccaacggttgtcattttatgtcccacagttcctattaaaggtatactatttactcctttatggtgccaaacatgtactgacccaggtccaagccataatgaatctatattattattttcaactctaattgcttcaccatctaaaagaccatctaatatgtccttatactttctagaaggaagaattgttttaacatcttttatttcatatccttctgttaaatttcgattcaacgctattaataccacatcacttccaaagtacctttcatatacataaatatcattagttatatatctttctttggtatttccatatggaagtgcataatttaaactacgaagggaagataaagattgtattatcttaaagttatctgtattcacatcaaaagattccatttgaccacgattgttcggatctccatttccaaccatatattgctctgtaccatagtatacagaaggtattccccttgaagttaacaagaatactaatgattgttctattctacgtttactttgtccattaatgtgaaaacggtccatatcatgattatcaataaaagtaacaagattatttacatcattataaatttgatatgtttcttcaatcattttgtgtaacccatgcatggaatccattccatctcgaaaaacttctcgtactttatgagcaaaactaaagtctaataaactcataccactattatttgcaaaatgaacatttctatggtcatactcatttggattgatataccattcaccaaaaataaatactggtctataattatagattgaatttagccaacttttttgccagccatatgacatgtgttttactgcgtcaactcgtataccatctatcccttggtctagccatagtttaatagcttctttaaaatacaaatcaatagctatattttggtgatttagatctgcaagatcaaataaattacgataaactccgtcttcatattcttcaaaatccgtcccaccattatgatgaaaataatgattgtaatcattatcgtatccaccaagtaacaatccattatcatataatctaccattttcagcataggtcgcatcatcatgtaatgcaggcgaagtgtgattaggtgcaaaatccataatgattttaatatcttttgcatgagcggttgttattaaggtttgaaaatctccaaatgtcccaaaaaaaggatttgttcttttaaaatcacgagcccaatagccatgatatgaagtacttcctaccaaatcatttattggagtaaagatattttctaccggttgagatatccataatgacgtcacacctagttcagtaaaataatttgtatttaatttttcaataatccctatccaatctccaccaaagtatttctttttatttttcctagattcatcatataatccccctttgggattatatgatggacatccattatggaatctgtccgttacaatttgatatattatatccttagaaaaattaacgttgttcctattcaccttaagcttatctttttctttcaaatgacaacctccatcccatagaagcatttaccagctattttcaaacgtttagcactctacccttaagtactatttgaaaaatagttaaaatatatttcgcctcctaactagtaactcatgtttcgattcaatttttcacacaaaataatgtctacaagtgggttctatatttgtcctataaactgtaccatttgatttatgtcgaagtaagggaaaaaatgtcattatatagggaggataaatatagaaaattcttacatataattatgcttacaaaatatagccccaataaaatacatagacaaaacattttttatttggtaatattcacctgaaaatatttggtaaaactttatgcggagaggagtattaaaagtaaatactagattattaataaaaatactatttatactactaataccaatcttatattccaaaataaactataaaatataaatatagcttccaatcttacaaatattgaaaatccaaggaaaagctgtaaagaaatttcaaaataatctggagaaatattttatttttaaaaattttatataaaaattaaaacattattgtacagttaaaatgttccttcctaaatgctaattaaaattttctttataaattaaagatttacttctacaaatttgataatgccattagtagatattttctagtaatttaatttcataacaatttaaatccacttacattctaagatttctatggttaatttatattgttttttatttttcaaacatttatgtacttaaatcgatttcatacctgccgtttttacctcaaaataacaatatcatatattaatatagctcttttacaattagattccatttcattaatcatctaactaactcgattactaaagttcatcaccattagtttgcaaacaaatttttataaatgagatacttaaatttgtgaggtgacaatactatgcaacaacaggtcgaattagattccgctcttgctgtttcttcgaaaaagacattatggaaaaatcgtacatttacttttgtatttacaggttataccttatcaatgtttggaaattcatttcacagtattgctttaaacctctgggtactgcaagcaacaggaagtgccaaattaatgtctacaattgccataactcatatggtcatgagcatgttgttttcttccattgcaggtactgttgcagatagggtggatcgtagaaaactaatgtggataacagatataataagaagtcttttaatactaagcatcgcattttgtattgcaatacccggtaccccctttattcttattattatcttaaccgctcttacttcctgtgcaggattatttcagtcacctgcattccatgcttccttagttgatattgtaggaaaagacaaagttcaacaagctactggagtattaaatgtagcagataatgtatctcgtatttcggggctagcaataggaggagttgtagttgcagcatttggtggtagcattgctatctcagttgacgcagttacatttatgttatccgctattttagtgttgctaagtggaaagtttcctaattctacaaaaaaaacaggaatcaaaaattcatttcaagaggaccttgttgcaggattcaagtatatatggcagaacccttttgctaaatctgttattatactctcgcctactttaatcacatttttcactgcttcattaatgcttattcaagtaatgtctgtaaaagtgtggaaggcaaatccgattgaatttgggataattgaatctagcattccaataggttatatgttaggcgcaggcattattatcttttttgataataagttacatcgacggggttggtggataatcctgagtatggttttactagctccaatctttgtagggctatcttttgctccatctgttctttatgcagtaccattaattctcctcttgggaatacttttttcattttgtacattgcttgtcaatgtgattattaaagttgaggtagatcctgagttacagggaaggacttttggaacactaggttctcttacgagtattgcatcaccagtcgctttagcaatttcctcatttttcgctgacatttatggtccaccattaatcttattaataaatggggtcttattatttatttcaggactaattgtactgttctttcttaaatcaattagatcatataaatgattctttttcgttataaaaaaatttaagtatccaaacttgaaaaaagccgaaattgttaaggatatcaactccttcggctttttttctatatcatttaaggagagatttttatgccaaagaaaatacttatactcggaacctttctgatagcggctagccttttaggttgcacagatatagaacacaaagatactctcaacaaaatagaagcacccggaaaagaaccagtggatgtaaaagaaaaagttgcacttaaacatatgacagcagaagaatatttaaaaaactataataaaattaaaagtactgtatctacacaaggcattgaaattcttccatttaatcttgaactagaaaaaaaatctaatacatataggttttattaccctaaagaagtagataaatcagatcaagatatgaaatgggtaagtgttatgttaggagaaagcggaaaagtaattgatggaattatgtatactggctacgcagatatacctacgattaaggcaatgattcaagctactaacattacatggactaatgaattagatcagttaattggttcaataggaaatgaagatttttcaaaaacattggaaattgaaaaagtgaaactatctgttaacggtaattcgaaaaatattaaagttatgatagattcaatgaaattagatccacctcaatccctttaaaacaaatatagtcccaaattcctatttaatttctttaattttacaccatatagaaatttatttagcttttaataattaagactagctatgagactatataaaaaatcgtcagcgcttttaaaaagcaactgacgattttttattctctaacattttcatttaaattggcatcaacaataattccattgacatctataataattatgtatgttatatatttcttaatctcttgttttaattaaataacagattcgctatgcgaaccgaacaaacaatctcttatttctccatgattctacaaatgcgctttaaattttatacaacttgaaactgacccaccaatgtcatctttatttgatgaggccttttctatttttaaatcttagtgcttttaatatagtttctttcatgatttcgtttcgatttctcttttgtttccgttgttcttgaaatgaaattgaaaattaattatagtatcccaaatggtatacacaagctatttcacacaaatgattgaccacgttccttaaattgtatttaaccattaatttttgaattaccaataatatttttcttggttattacattaaagttaatattatgatatatttatattcggaataattatatcttacatttaaagggagaattctaatggataacctactattgaaaaaggacttaacaacggatcaaatggttcttgttacttcagagtttgagaaaaagaaaaaatcaaaaggacttgcttacctaatttggttttttctaggcggacttggtggtcaccgctactacgcacgtgactttggtatggcaattgccatgacactgactcttggcggacttggtttctgggctttaatcgatgttttctttattggaagccgaattggtaagaaaaatgaaatattagaacgtgaaattattatgaaagttaaaaagatgactgcttcaaaacgtttatcttcataaaagacctcctttaggaggttttttatacaaacacttcaattttacgtaactcgtccttacttctctttttatgtatttttatgttttaagaaaatgactccaccaactagtaacaacgatgctcccactgtaatagacttgacgcttgtatggaattgatcacgcagatatttcgatgtaagatttcatgtttaattcagatatattgatatacactaacaatgaactactcaacattttcattttaagttagtatatcaaaccctaactacctaaagaactcaagtaaacgtatcttatgtcattttaaaaaatacaaaagtaccttatattttataaggtacttttgtattttttattttagaattcctcgatttaaactgtaaaattgaaatataatacagattacgaaccgttttacacgtatctcggatggacttcagaatcacatattgttataactactgctattcttctctaattacatctataacgttatcctttttaattttccgaagcggaattagtaccgatacataactaatcaacagtgcagtaataaatgtgataaaactagattgataaggaataatccattcaaaagacaccgtatttgacaatgctacataaagaatatacgacaacatacagccgaaaaagatcccttgtatacttccaaagaaaccgtacaggagtccttcatatataaccatctttttcaaatccttctgtgacataccaatcgattttaaagcagccaattcttttcttctcataatgatgctgactgtaatggtatttaaaatatttacacatccaattagtgtaataacagctataaatccgtaccctaatatttttatataaagtatattgtctgtatggaaattactttgaacaatattattttgtacatctatagatgcatctccacccagtttcttttgtatatctaaaattgtagcatcagcccgagattgattctctaaatcaatttcaaaacctgttaatttttgtggagatggtgtaatatattcagctatttgttcactagtaataaaagttatggtatccatcactctgctcatattaaaaatgtccaattctacaattgcagctatttttaaagtttctagtttttcttcattgtaggagatttcctctgtagattttctttcttgctgacttgttatttggatttcatcccctacctgaaaagtgcttagagaacctatatattttttacttgtattcatatcatttgatgcagcttgttttactaaaacaacctctttttcacgatttaattttgaaatatcaattcttccactagttacattttcagctagtttctttaaactattctcatcgtatgcttttatttgtgttttcataatttctacagtttgattattatattttattttttgatacagcgattcatttccttgtaattctttaatttgtttattatttggtactttcgtataaaaattatttgcctgatatttcttgtacagcttctctacgttattaactttataaatattttgactcatacgatctatgctaggcttgtctaaatttgaattaaccgtaactgatatatccgattttagagcttgaatttccggttgtttacgctgaatggcagtatctatgagaaacgtaaacgtgatatacagtacactacttataataatagacaaaattgtaactgtatatctattgggattcctttggatattttttaatgccatacttaacggaaaagatagtggtttctttaattttgttctcttttttttctttattttttctttttttatagctaatcggctacttacggccaataacggtgaaattctacctgcaaaaaaagcaggaaaatagcttgaaatataaacagttatcaatgtaattaaagaacatacacatataattaaccaatctaatttaattgtatatcctatagagtttttaagtacgtttatcaatacttgattaagtaaaaagactactaatatactgcacaaaatcccaaaaaagatagcaataatagaaagaaatgttgcttcccttatcacaatctttctgatttgtttttttgtagctcctatactcctcaataacccaaactgtttcattcgctctactatactaatttgaaatgcattgtaaataataacaattgtagaaatcacaacaatcccaatactaatagcggctgccgccattatctccacactaggctttaaggctttctttaattggtcattcactcttatattttctttattcgtcaataatttaaattgattttcaacttcatcaaagtttgcgtacttatgcaattcaatcaatacgctaccttctccaactttaaacttatttttatatgtcaataattgaccgggtttattttcctgattactactagacttatttaacaaaccaacaagtttatattttttttcatgaatagtaaacataccgcctaatttaagattaggcccgaagtaaggcagcatccatttttctaaaacagcctcgttttcatttgaaggtagcttaccttctacaggaatactagactttaacagcttcaatgcttgatgatctgcatacatataagagacagctatctcatcaaattggatcacctctcctggagttatgatgccataagaagatatattaggattactttttatcatattgaaaagcttttgattataattttcaactgaaatatttgcagaacccatagaaccttttttagcattttcaattcccgaagtgtatccactattaaaaaaaagtccaatcgttgttattagcgccaacgctagaataatacctgttaatgttagcaaagtacgttttatattacttctgagatatttttgacttaactgtttgtaactatgaatcaatactcctcccctccatatttttcttgactttgcactaattgtttatctgaaataatcatgccatctgtaatggttataattcgatcagagtttgatgcgatagcaggatcatgagtaattaaaatcaccgtctgattatattttttagccgttacttttaataaattcagaacttcttttgtattttttgtatctagatttccggttggttcatccgctaagataatatcgggtttatttataagagatctaccaatagataccctttgttgttgaccacccgataattcagaaggcaaatgatctcgtctttcatttaaccctagagttcttataatttcatccaggtaatgatcatctacctgttcttcgtccaatagagctggcaaagcaatattttcttgtacattcaagacaggaattaaattaaaaaactgaaatataaagccaacttttcttcggcgaaaaatagagagttcattatctttataattgtagatattttcatcacctataaacacatttcccgaactcggacgatccagccctcctaaaatatgcaataaggtacttttaccagaacctgatgctccaactatggttacgaattctcccctacgaatggaaagattaattccttttaacgcctgtacttgcgtttctccttctccatatgtttttactacattttctaatctaacaacctccatacaactcatccttttcacagattaattttgaatctctacaaaatagattttatccttatcgtactcaccattctcgtctttcactgcatacacttttgaaacgtattccaccaccttatttaccttatttttatttttataatcaaacttttcttttgcaaactgaattaacgaaaggcttacttctttttcttttaattgtttatacgtttcctcattaacaattactatcggtgatgaaaaatagccaatccaattattttgttcaatatgttgaacaggtatcatttgtccatttaaatttaaatttccatccttaacttcctcatcttccgcttcttttctataaaataaatttttttcactcgctaattcttttatttcttttaccggggttgaagttattgaactatcttctttagataagggtgttcttacaattcctttttttaagaatttttctgctgtagattttgtaataaccgcgtattgtttctttctaacagatgacttatcaaggtctttgtccatctcttcttcagtcatattttctcctttttctttccattctttcttaatatcttctttctgttcggtagtgagttcttgttttattacttctgtgaccaatttataactataatctgctgtttgcacgttttgatctttatacagatttttaacagcagatatattttctttcgttccagataccataataccgtctactggttgtgagggaccatttatataacgatttacagcaaaccctatacctataaaaattgctgttactactagaaatcctattatctttttcattttcttcctcctcatatactatgtttaatctgggattagaacagtaggttttttctttatataaacagtggctaaaatgctacaagtcttaataaagaatgattaccttcagtatagacgtctttaattgttaattgaataactcttgtcttactatatatactttaatcttacagtttagtaagattactaaatctaacttttgatatactcgtaacactgatcaagatatactttaaaattaaatggcttttatacacttatttaagtacacacatatttttcaaattctcaaaaatccgctcccattcggctcttattctcaatgatttgtttttttaaatccatttacataattaatgcgaattcaatttcatttaacatttttgtataagataacttaaacaaaacattaatggttttataaaaacgtacaaattcaacaagacactattacaaggtttttcaaaatataagcaagtacatgtatgaattacataaatattctactttaagtaattgtttgtatctcattatgtactaaaaagcttcaagccgatttgggtattatgcttatactcagaaaagcctctaaaattccatttccatactaaactattttaaattagccaaccaacgtgtaaaataactgtcataatctaaaatactgccataatcaaagacaaatgaggagagatactgtggataaagtattattcgttgaagacgataacgatctaggaatggctattgagtttactctaaaaggagaaggacttgaggttataagagtttctactgtacaagatgcaaaagaccaatacgaaaataataaatttgacttagctatattggatgttggactaccagatggaaatggatatgatttatgtacctaccttaaaagaaaaggtgatatacctattatttttctcacagcactggatgaggaggctaatgtagtaatgggccttgatattggtggagatgattatataacaaaacccttcagggtaaaagagctattatctagagtaaaagtacaattaagaaaaaaaattaaaacagcttctaatactatattgaggtctgaaaatatacaccttgaagttgaagcggctagagcttttaagcatgagaaaagtataaatttaacacatttagaatacaaactcttattaacgttaatgctaaatcctcataaagtgttacaaagaaatgagatattgaaaaaaatagtagatgaaagtgaagtgtttttcgatgaaaacactctttccgtttatgtaaaaagattaagaagtaaaattgaggatattccccaaaatcctaactatataatcacacaaagaggtgttggatatttttggaataaaaacgtcagtaaggagtaatttaatgataaatagagaaataaaaattaatatacttacattagcattaatcgcttttttatttattatatatcaaggtatcacagttcatattctatatgaccatttaaagaatgattatattactatttggagtgaaattaccgggaaactaattgcacaaaacccagaaaatgaatatgaaataatacaagcacttacaaatgatacagcgaataaaaaagagtattccagtgatggagaaatgctattaaatcaatatggtctatctgctgaattagactcaagactttttccttatttaaataaacatatatctcaaaacaatatatacatgttccttggagcaatagggttcagcttaatcctaatttttctaaattacttacaatataaatcttttttcttaaaaattagaaatgtaacagctgcagcgaataaaattattgaaggtgattacaccattgatatcaaggaaaatagagaaggagatctagctaaacttgctaattcttttcataaactgaaaaatgttattagaaaaagtatgcataatttaatggaagagaaacaatttttaattcaaactttacaagatatttctcatcaactaaaaacaccactctcaacactaacagtgaacaatgatatcttattacaaggtaaattaaatgaacagcaatatcattttttacacaataatgatgttcaaatttcaagaatcagctttttaatacataatttattaaaagtttcaaaaatagatgctagggcaatactatttgaaaaagaaaactctgatattattgatacgatttatgaggtcattgctagtttgaaaagtaaattaaataaaaaaagtatgaacatacatttaaaagccaatgaaaaaacattacttttccatgacagtatttggatgcaagaagctttattaaatattttaaagaattccattgaacattcaaatgataatagttccatttatattgaagtcacaaactcccctattcatactgaaattataattcaagattttggtgaaggtattgcatcagaagatttgccatatatatttgatagattttacaaaacaaaaaattctaataaagaagggtccattggaattggcttagcgctatcaaaatcaattatcgaagctcatcatggatttattaaagtagaaagccaaaaacattcattcacaaaattcacaataacttttatgaaatattaacagtacataaaagttattataaaaccctaacctttgagtatattttttaaaaattaatcatctgttaaaaaaagaaattcgattaatttttcataaatgactgtagagagataaatttttcctttgggggtaattaaaaaccttagcttgatgtgcataggatcaccatatcaaaaaaggaaacttgtacgtttggacacaatttagaaacaaaatatccgattccttgtacgttaagggattagatatttattttactattttatattgtgtacaatttcttgcttatgaggtctgtgtggcaaccgaaccaaatctgatgataagtattagtggacatcaaaaatagtacattaatataattgcttttattaattatacaagtctacctgtggcaatagtctcaggtattttttcgttcattgtgtttgtttaatttgttattatattttcttaataaaaaataagacacagcccaaatcacgacagcgcatactatagttcctatacacttaatcaaaatcatttattctcaaattattaattactttgcttcaatacccattctctttacgaaaagtatcttttccattcatgaagtcagctgtattaccaggaatgctatacttcatattctttttcttagcttttttcttcaccctcttctcttctacaacagcttgtaaatctgccttccattgtttaaacaaatccatttcacgacacagcgaatttgtaccccttggtttaaatctgaatcaaataactatattatatctatttatataatcgtttaatataaatattcatttttccaaaaaataaagagcacctgacgatttcaggtgctcaaatatatgaagtggggctaccccattctctaatatatgcctgtccttattaaaaagtgcaaaaaaagggtacccttcaacaaataaatatggtgctccaaagtttcatctcacatgataattcgtcccatgaattcatcatatgcttgtctaattagaatgttcactggttcaatgcggaatttctttttaacttttaacaaattaaaaacatccattttggatacttaatgtacactaatattaatattgaatagctttattgatagactgtctagagcaaaaaatatactagctgaaactgatctatatccaatattctttcctgtaacattgatagtaatctccgctaaatgggttcgcacatcatctctttcaaaaagtttatcttcaaccttttcgactattgctacattatccacttctttaaaagttttcagcaattttgtttgaagtaaagtaaaatcgaaattttcacctttaaccacatcaaatttaatctacatttttaactagtaaatatatttatataaatatatttttgtatattaacattaaataattcaaaggtcattctttattaaaatcccctattgcttaaatttgttctttattttcacataaggtacgtgaaattttattatctcattattgaataggagaaacttgaatagctagtatgcccccaatctactctgcatggttccactatccattaagcctttaataatttacgtgtcttatctatttcgtatgtgtgttaaccagttcgtttgcaaacttgttagcacattttttatatttcttctatatatatttcccttcacaaacatatcatactttcccgctaactcttccagtttcttttctttgtatttggtatgtataaagaaatgaagtattattatttttctatgtttttttattctaaaaataccttttcgtttcatgaggcttcattttatacatcatattaataggagaaaacatacatgttaccatttgaatccatattcaagaaacaaaatgataaaaaagactaccataaaaacccactcattactagaaaaaatacataatataattgcgaacgtataaaattcaggtatattttaagggggaaaattatccaatgtcaaatgaaccgtgtccaattattgctccgtgtccagttgtcagtcaaacacaaacacctttatctaatgcaccagcagaacctattgttacggtaaatcctataattaaagttccagttgttttagcggagagaacacttcaaattgttgtagaagcagatgttccattagatccaccggcatctgaaattaaacgtgttctaaaaaatgtatttttaacacaaggtaaattagttcctgtagcatttactccagtagaaggtacgccttatcgtcgtgttacaagagcaaaattatttgtatcaggttatattcgtaaaaatattgaatatgcatctggtgaatgtaatgcagctttatatgatcgtattgctaatgttcctttttctggatttgcagatttaacagaaggtgattttttcactttacctttaattgcagcttcttcagatacagcctctcattttattaatcctaaggatggcgatttacctcgtttggataaatatttcttcgaaaatcatgtagtttataatgagcaacctactgttgaaataatcagtgctaatttttatgaattagatttttctccatgcccaacaacgttagaggcaacatttgatgctttacgtgaaaaaattgtgttagatcttacactaaaagtgttgcaagtacaacaagtacgagctggtattgtttaataaatagaaaaagacattaccttctttatagaaggtaatgtcttttctgttttgataaaacatacataatattaacaatgagtgtatataactgatatgggtttagttataaattcatcggatgggatgtgtgttactgatgaataagccatggtctggtaataatatggggcataaaatttataagattaaaaatttaaatgagcaattagtttcaaagaaaaaacaaaaaaaagagaaagagaaggagaaagagaatgtattttctgaaatgagtcaaagtaatagagtaaattccatggtggtaaaaacaccgttttctgttgtgtcagaagtaactaattttttgacaaatcctattttgagtgaaagaaggcaagaagtgtttcaatttgaaaataacaatattaataatgaatttcgtgaattagagacacaattaatagctacctcaaattattattatgaagagccgtattgtaaaatggtttcttctaagatttttgaaaatagaattcttttcgaattggatttaaagaaaaatacaagtgatattccaagaataaataaagtagaatcatcatgggttcctatacacaatttcatagtaaagaaaaaagaaatagaatttgagaactatataacaggtgaattaccaattgaattgggtagatataaaacagaaattagcttacaagaagtgatagattttaagaagaggattataggttttcaaaacatttcacaagatgttattttaactgaaagtaaattattgttatcaaagagaacagagagagcaaattcaatttcaaaagaaattgtaatagataaaggtactttatttgtgaatgggcatattcttcaaacaattgaatgtcttatagataataaacaatctggtgataatttttattgtttaatgcagaatatagagttggaaatagttattaagattttacaaaaacaagagctgtccaattgattgaagtgcaccccaattgttagacacagtctaacaattggaggtgcattttttatttttacaggtctctcatgaaagtaaaaaaattaagtttaaacatactatacgaggagcggaagtgctgaacataagtgctgaacatttttcaatgacaatgattcaagccttccaattatagtgtgtacaaataattacaattcatacaaagaggcaggtgtaaattattcatacattaaaattactttattatagattgagtgtattacaaagtacaaagagcacttttcaaaagtgctctttgtaaggcgtacattaaggacttgaaagaggcatcattgtcaattcgaaaggagatatctatatacaacatatgaagatgatttgaaagggtgacgataaaaacaaaaagaccagtaagggtgtaccgattgctcagattcaaggaattggagagggggatttatattgttagggaattttttgaatgctattccattatgataaactatgcagatgaataataagagtgaagttgtaaatttatcatctatagtgtaatcttcaccatttgaaataggaactcttaaaatgttatcctgagaaactagatgcgatcaatcatgttgataatcaagtgcttcgtcctttgtagaacctggggaggcatatgccgctgtaattcttcagtaaacgtaagcatttaaagattcataaagaaatgctatcccttcctataattctatagaaaggataacgttttttgctttatgggtcgtataaaactttagcttgatagcgctgtgataatgccccgtttaaacaaatttcccttttccatactgataatgccccttttttagagtcatcctatcagcatgtcgaagattaggagattacttgcaagagtcttggaattattgcaaccgtgctgtgttataattctaaagtactgacatttcatgtaggacttatagatgtcggtttgacatatgaaatgtaaaatcaatccgtcattttgaaggttcaggctaccaatatttaaactattattcgaactaaaagaagtacaaggaggaaggtatatctattaagatagtgagatatgccaaattagaaatgaatattaaatttaataaaaaagtagtagcattcacggcaggattaacggtattatcttcaccattggtatcgtttgcagaggaacaacaatcagtaaacaataagcaatctacaagccttcaagtgcaaggtaacacagaccaacttcaaacaacaacagatgaacaggctttaaaaagtattgaagctagttttgaagaggtagacggacgtggtggaggtactgtcgacaataggaaagtagatagtcttcaacgttcagaaggtattcatgaagaaacaggtacattaactgttcctaacaattcaaacagaacaaaacgtagtctgtctcccatatcacctagcacctctagtacaataaacggtgttccattcactgaatggattgttccagcaggtaacgataatattcgtcctcaaaactacatgagtccaaagtatattacaattcatgagactgataatacaagtgtaggagcaggtgctagaaaccatgctcaatacctatataaccaagcagtaggtaacacggaccgtgctgcatcgtggcattttacagtagacgataaagagatttatcaacatctaccattaaacgagaacggatggcacgcaggagacggtgatggtccaggtaatagagaatctattgcaattgaaatcgcagttaacagtgacggaaactacagtaaagcagtagataacgctaagaaacttgtagcttatttaatgaaagaaactggtgtaccgttaaataacattgtaaaacaccaaaaatggagcggtaaaatctgccctgctaacatgattaataatgggcaatgggatgtattcgtaaatagcgttgagggatattataataatctttatcaaccaaaagatgacattacaggaggttggtatgaagaagctattcgagagttaaatagaaggggtattatgataggggaaggaaacggagttttcgcacccaatagagcgataacaagagccgaatttgctcaattaatctctaaatctctaaacctgccagctggagatgcttcatttaaagacctaaacgatgcaaattcaactttacgagatggtattaaacgtactgcaagtgcaggtatcattcaaggtagaggagatggttattttgacccaaacacacctattacaagagaagaatcagcaattattgtaaacaaggctttacagtataaaggtatatggggaccagttgtaaacctaccattctcagacaaagaccaaattagctataaagaagatgtacaaagattgtatggcttaggtattgtcaaaggtaagggtgaaaatcaatacgaccctaaaggaacaacaactcgtggtgaaacagcaacattcattctaaatatgctacaagtaattgaaaatggcagtgttgaaaaggtagttggaacagctcaaattaatggtattggggtaaatgttcgaagcgggtcaggtacaaactattctattgttagaaagacaagtaaaggcgaaaaagttacagtatatgaagaaaagaatggttggctaagaattggaacaggtcagtggatttattatgactctagttatatcgactataacagattataaaagactaaatacttaaaagaacaggtcatatttggatatataacttaatctcaggttgtgaagaagactttcttcacaacctgtttttgtgataattaagcagaggtcactatacatacccatccagcccatattatgaaataccttaaaacgaaaaaatgagctgtattgttacaagttagcacaaaatttcgttctgagggtactataaaaccttcgcttgataataaagagataacattaactttgttgcctagaattgcttgtgctagatgtgggtagattcgaaatttataggctttattaatcatcacttgattcatcttcatttttgtaggtgtctccttgattaaaatgataaaaaatgcaaaaagaacttgtaggcatcactacaagttcttttttagataatataaaaaggtgaaacaaactatctcattactcgtaacagggaaactatcttacttaaggcttggtttcattatataacaaatattaacatgaagcgttttaatgtgtgaaaattatgtgaattagcaaatgaaatttcatctctattcgttttttaacacctataaatcaacgttgaatggataaacaatatttgctaaaataatattataataatgcgatatacagcaatttatataatagaaagataaaaaatttacatatcactaatttaacgcttagccgttgattaatggagtaaggtaaataacgaagtacatttaatatacaattctttacgcagcataagatacgtaattaagacatttgatagaaatagagtgcgaataatgagaaagatgctgacttgtgggttacactgatcaacttgaaatgttataggggtgtacaagtactacagccaaaaagtgatctgtaatgaatatcgaagaggcttacgcaaagttatatgtgagtctatgtgcgaaggaaaaggataacgtttataggaggaagcatgagggggcaatttaatatatgtaacgggggaataatattatgaaatttaatacgaaattattaaagaaattacttgtattaagtgcaacgtctgtatcaattttcagtgcctgctctgcaaaggaagatggggattacaagccatataaggaacaagactctatagaagtcgcaaaggtcgaagaggagaagactaatccccctaagattgtagagaagaagtccactctgcctaaggtcaaagaggatacagaagaacctaagaagaaaaaaaagctacaacaagtggaggaatctaagaataaagatgaggaaattaatgacaaatatccgcattataaagatgtacatgaggacgcatcaacagtatcactagaacagtataatcaaatcaaggttggaatgcctgcggacaaagtcatagagatagcaggaaagcctggatccagcgaaacaactaaattgttctctatctacatatatttaggtcacggtggacacggttcgatgactataaagtttgattctaatagaaatgtaacgaacaaagagcaagatggtcttagcaatactgcagttaaagatgagaaggctagcaaagaacatgaagaccctaatcctgaatctgttaagaaatctagtgctataattccaaacgatttttgcggacatggacatgacgaaacgaaggagctagcgcacgactgtgaaaaaattactgataagaaggcatatagaagatatcaactacaacaaaagagagaagagcgaaaaagacaaattaggggcgaagaacaggaattaattgattacgatcagggggatgcagcttacaaggagcagcagcgtatatacgaagaaatacaacgtagaacagaagaaagggaatcgattgactacgattacgatcaaattagagctgttaacaaagaaaggcagcgtatgtacgaagaaatacaagagtgagatgaagaaaaagagtgtaaagtgtaaactaaaaaagctaaatggtacgaggagtatatttcatagataggaatttgaattattgaaaaatcaaaatatggaagagtaaataaaagacgctagttggcgtcttttatttatcattattagtaaaacttcactggtgattactattaatattataatatttgatcttggaattaacttattagataatgcgtattgattgtataacatctgacaaatgactaaagataataaaaaaattcttgatacgaaaatctaaattgtataatatataggtatattgttatttgttgaattccgtttattcccacgccttatgtgttgtggttgagttgcagaagcaagttgtgttcttgtttcaattttgaaagggcttctttgagccgattagtgcatatatagcttattttgttatgcacatttttaatcgacttgaagaagtcctttttatgttgttttcaagttgcaggtgggattatttatgattcataacaaaatgaaataaaataatgtttgaatagtattagtagatctaaaagagtaatctaaagagccggatgatatattgattgatatagataagttattagggagtgcaaatgaagaactgcgatataaatcatgtgatggtagtttatacaggggaaaaggaagaactaagtgatatgaatacttggagcttccttttttattgcaattagaaatctggtagatgattatgcatataaaaatgatttggcggaaaaattttatttaatttcaatacatagaagaaaaagaaaaaaacaaattcgtaaagggctagtttaagtacgattcatttgaataattgagaggggaaatgtattggtgaaacgtcttgtttcttgctgaccaagggaatgcaggatgattagtaaggcgtaagagcgtattactactctcacaaaggaaattacattagaaaagggtctgtcagtgtttacaatttatttgttacatcggtctaaaagaatttggatggagaagtaaatgctaagtgagaacatgaatgacatttctataacttgaacaattgtgctttttgttaatagtgaaaatcagaagtagaagaggcacaagcgttaaagtggactgcaaaagtgacagaaagagaacaaggattaacattatttataaagatatctaataagaagtgctatcggatttatacagaaggagggataataccagaaaatatatgaatgtatataaaatttgaggtgaatccacctattttctatacattagttgaatcaaacaatagatgactagggagtgtataacatccatttcccagttaaattttcttagataaatagcatgaaatacagtatgttctcactcatttgtataaggataaaatagccttttatttttatgcaaatgagtgaaacagaacgattcaccatataagaatattcgactataatgaaacactgtacgtcattgtaatattaagatgttttaagattaaagtgattattagtcataaaatatgagtttcgagacctcagcaaaatattgcaatgctttatatacatgagattgtaaaaattattttattaaaattactggaggctgatgaaatatgataatagatcatataagcaacaatgtagtaaaaaaattggaacaaacggtgcgctatgaaaagaaacaggtacaggtattacgtgtaagtaaaagtagttctaatatgcacgcttacatgattttcccagaattctcagaggttaaaatttcaaatactgaactggatgaatatatagaaaatctatcaacaagtctgaaatatgtcattgatcgcaagttaagtctacaagaaattgaaaaacaaaatcattctttcattatgacatgcgcagtcgaggaagatggtgttatagatgatgaaacgattcattttaatacgacgtatgttaagccacctacacttgcgagtaaggtatttaagctagtgtgtggtttaggaaatcgtttgaatagcttaaaagagttacatataacagtattaaataataatattaatcgaattgaaatagagttttataatgaaaatgaaacatatgtagcagtagaaaaagaagaaattgcaaatgcgattatgggggcatatacaaaagccaatatctattattccgcagatctccgttatgttgcagaaggaaatgaaatcaaattaaagagcattaagccaaaattagcgggtgatgtgttgtgaagcgagaaaaagggatgattggagttttatgtacatatgtttttatgatcctagtactcatacctttacatacagctcatgcatctgtaaaaatggattttaatgaattgaaaggaaatgatgtttcttcatcttttaacgaaggattaaacaatcgaacaaaaacgacagagaaagacgattcatttgggtcatcaattatacaaaaagttgagggtatgtatgcaccagcttttaaagtaggggtaaatatcttttctatctctttcatattaggtgttattgtcatggttatggggttaattacaaagaatggtcaatggatgaaatgggcaacagggagtatgattttctcgttcgttagtatgatggcaatgagattaagtgtatatttcttatttagttcggatgtattttcgtttatgaacatttttacggattttttagacctgtttaaagcaacagcacttatttttacaccctttatgttaattgcaggaattcgtttacgaagaattcatgagagtacaaaacaacctgagtattatcgttggtctaatcgcgttataacgggatcttgtttactatgtatgttagccgtactggctccatggttatttgcgaatatgtaaagaaatatatatagatgcaaaaggtactgaatgttcattcagtaccttttatctacccatctgatttttcctttcatattctgcaaatatctcctctgatataggggataatttgttcgatttttaattgtttttcgttgtaaattatttccatttgtagaatgaatactcctcgtagtagagctggtatgcctacaaaacagacgaggaagatagaaactaaaataatatttaaattagaaattcatacctcgtatttaataataacttaatttattttgataggagtgcttgttttgaaaagaaatccagaatataccgctttacgtaattctatcttgataggttggctgctcacaattattgttatgggcttatctatctatttttcttctattatatatttactaattggatgttttattttgtcattgaaatatggattaatgggcactataaagaatgtagaaaagcgtttgccaacctgggctaattttggagtgattgaaaaaacagtgaatcggagggtgacaagaccgtttcaatttcggggcggactcattgtttcattagcattaggattcatagagatggtgataaaaggtttatgtatctcatattatattttaggattagaaacccatgtatatcgtttaatgcgtagaaacacaagaatgtgaaaaggggacttaaattatgaaagtattaatatttgaattaattctaattgtgcttctgataccgataaacattatggtaaaaaaacatgctccaaaatggaaaggaagagctggagaaaagatggtaaaacgtatagtaagaaaattagatcacgaaaggtattgggtgttacatgatgtggcggttcatacagagtatggtgatacaactcaaattgaccatattgttattgcagaaacaggtatatttgttatagagacgaagaactacgagggctggatttatggaagtgagaaggcagcaagatggacacaaggtatttttagaaagaaacactcttttcagaatccatttagacaaaattataagcacatgaaaacaattgaatgggtgatggaacaacagctgccgtgtatttctattgcagcgtttcatccaaaatgcagcctaaaaagagtaaatgttcattctaaagataaacatgtcctatattataacgatctaaaaaaatgtatcgaatcctatattgatgtgaaattaacaaaagacgaggtcgagcatatttaccagactattttgcaagcaaatattactgataaggatactgaaaataaacatgtgaagtatttacagaataagttcgctaaacaataagaaacggagcaaggaacaatgttatatataataggatttttggtaatcatcgtagtagttattcgtcttaacgtgaagtattaccagttaaaaggtaatccaaaagattttgtgatgaaaaagaaggattaaggatttattttagaaatagaggtaatagaatacatatattattttagccatcaccaaaggtcataagaaccgttttacgatcgataaatacatacattactatattttattaatgaatttaagtgatataataaataaaaataaacaggaggtttagttgtgaaagaagtgttagatgtagaaacgtatttaaagaaaatgaagaatcagaaaataaattatgataaagtattaagaaaaatgattaatgattgggaagcaaggaacgaaagaccaaaagtgttacttcattcatgctgtgctccttgtagtactgcttcattggaatttcttgcagaacatgcagatattacggtttttttctcgaattcgaatattcatccgaaaagtgagtacatgcgacgctctaatgaacaaaagatctttgtagaaaagttcaatgatcgtactgggcacacagtaggatttcttgaggatgactaccgttcaaatgtattttttaaaatggtaaaagaagaaggtttggcagaagagccagaaggcgggcttcgttgttcagcttgttttgatatgagattggatcgttcagctgaggtagcacaagaaaaaggttttgattactttgggagtgccattactctttctaaaaataaaaatagtcaattaataaatgaacttggaatcggtgtacaaaaaaattatgattcgcgttatttaccaagtgatttcaaaaaaagtaatggatatcaacgttcaattgaaatgtgtaatgaatatgatgttttccgtcagtgttattgtggatgttcatttgcagcagagaaacaaggtatagatttaagatcggtgaacaaagatgcaatacattatctgaaagaaaataatcttagtttaaaaaaatagatttaatggagagaaattcgatgtaagattaacctatgatttacaaacgaaacgcattatgtttctaaaggaaaaacgtaaaaagctaaaatagttcgggaataactccttactggttaaagttctagagaagaaaaaaccaataaggagtgttttcttaatctcgcattgcccctgcctctcgggaagtcattgctccttgtcctgctcttacatcattttgaatttcttgtttcactttttgtgcatctgtttcagcaaaatctggtttcataacagaaccaggactttttatagattttttacgatcttgcatacaacccctcctcgatttaacatttaacaatcttattatttacaaaaatacactcggtatactccgagtagtataatgtttattgaagaaaaaattgattactataaggtgatagaggaacatagggaataacaatcttgcattaacatctctctcaaaagtttagagaaatatctgccagaaaaacgcctttctctctgtagaaatataaaggaagaatagtgtttttttattttggatacaatagtctaattatgcaaataaccacttgttaaggttattagtaaaagtgggatccaagaatgactaaatagggaatctaatagatggatatggaaaaatttaattcaatataataaaaaacctttatttaaggcgattagacttgctttaaataaaggttccatcaaaaaatcactatcaattgttagtttaaaaccaaattgaagtgtatatattttattgggaaatcgctttatagacatcaagcaaaccattaccaaaaaaacttttattagtaggggtatcattgctaactccatttttataaagatatctcacggccttatctggattttttttaaaattatttttatcaataattaatgctaaagcacctgacacttttggagcggcaagtgaaacccctatagagagagcatagccaccaccaggggcggtagttaatattagttcttttaacattaacttattttttacccactgttctaaaccatattgctgaaataatctattatctcctccaggtgcagcaatatctataaaactttcaccataatttgaaaataaggagagtaatttagatggaccaacagatgaaactgttactatatttggcaactcagcaggaacatctaatacttctccagtaaatgttatcccagtattttcatttttttttctaaaaaaatcattcatttcctgcttgttagtaacatcaagagcatcattaccagccgcagcaactatgatacttccctttgatttagcatatttaatggcttttctataagctttaatttcggataattcctcactagattcaccgtctgaagaagatactataccattgatgaggtattcgcctaaacttaaattgataacatcaacattatctttcgcagcttcaactatggctttaataacccaaatagcctcacctgctccattaccaaacactctatacattttaattccaataccaggagcaacccctttcataaaaccattagctgcaacctgtccagcagtaaaagttccatgtcctcttagatctattaggcgatttaattcacctgtttcttgagattcttgctctctaaatccacctttaggtactaaatttttagatccaggtgaaatgttatcttttaaatcaggatgatttatatcaatgcctgaatcaatgataccaacagttacatttttagttcctggatatagtctatagctatcaccattatgggttacttgttgcatatcccattgattctcccatatttcatttaagggtaggggggaagagacattggttgctacttctcttgaattaaacgattgtaatgacttattatatgaatctatattaggatccgaatgaacaatattcattgctttttcggtagctttcacttgtataacaccaatctctgggacactatagactacttgcatatcatatttttgaaacttactagctagtttttggttattttcatagttcttcaacattatagtataatattgtgatttattttcagcatgaactgtagtaataggtatgaaagttccggaaatcaagttaattaacaaaaggaatttaattatttttttcataaaatcacctcttgatatattatgtataatccttagtttactaaatcgttaatgaaaagagatgttaagggaattagtgatttgaaaaatttattcactttgatatcgataaaatgtattttaggaataagttcattagagaagagaattaaataaaagggaatgagtaattaaatatataaagtatttaattactcattcctatgatttcaaatttaaattataaatctttttttgcatatactttcagagatattatcattgatataaaaccaataataattgagatgaaacaaggcatccatgttaggacagttggtgagaatggaaaaatacttttgaaatcaatatcacttgattgtagtccccttataagagtaggagcaacaaaaggtattaaaaaagcagttaaaagtgatatgattttggttttgtcataaccaaatttaaactgaacaggaagtagtacaccaaataaaatacttagagttaaaaaagttattccaagagcgctagcgctcaggctttctatacccgatggtgcgacaactgaaatgattatacggataatagctgcacaaataaaaattacaaaaagaaaaaggtacttcgcttttacaaatgcgcttcgtgtgtatggggtagcacaaagtaaagccgctcccttgtactgatcctcaaatttggataccgttccgaacaaaatatattccatcaaaataacggttaaaagaaagctaacaagaccgccatcgtttaattgtaattgtgaagaaagataaataggagctatagcagcaaaaacgagtaagattagaaaatattttttgactaacaaaaagtctttcatcactaggttaattaacatggatgttccccccaatatatgaaagcataatctcctcaatagttggtctttctattaatacatcaggcatgagtcgacgtacatcatcttttttattagtaatcccttcaaatccatagtgagtttgatgtaaatttaaaaaaagaggtcttgtttgtttattaattaagcggttgtcgccctttaccaatgcatgtgtatctattaaaacatctttttcatcatttactaaaacttttccatcatcaattaaaataatcatatcagcaattttatctaaatcagatgtaatatgagtggaaaaaaatacgcttttccccggctctttcatgaaatcaaggagaatatccattaattcactccgtactaatggatccaagccacttgttggttcatccattattaatagatctgcatgatgggatagggctaatgcaactgcaaatttcattcgcattcctttggatagagtagagattttttgttctagatttaagttaaactttttaatataattttggaaaactgtttcatcccattcagtgtaggatggagcaataacatttttcatttcctttactgttaattcatcataaaaatagccctcgtctagcacaataccaattttgtttttagactttctttcatgcttatccatatcttttcctagaaaattaattttcccagaatcttttaaaataagacccaaaatcgctttaattgtagtggtctttccagaaccatttgtaccgataaatcctgttatacagtctgtattaagtgaaaaggtaacatcttttaacgaaaaatttccgtaagatttatttaaattatttacttctaacacaacattcatttttcattctcctcctctaaaattaaatctaaaattgaatggagatcatctgcatgaatacctatactacgagccatttgacaaacttcagtaagtttaacttctaccatccggcgtttggactccattaacaactctaaatttgtaggagctacataggtcccttttccaacctttgtaataataaagccttctgtttctaattctgcataaactctttttgtagtaagtacacttacatgtaagtcgttagcaagtgagcggattgatggtaattgttcaccctcttttaattcattgttaaatatggattccttaatttgctcctttatctgttgatataaaggcagacttgatacattacttaagactattttcattaaacaacctctctatcgataagtgttatgttatgtaatgcacaccatacacaccatacacagttaacattataaattataaaaagcagtttaacaagatatactgcgattaaataacttttcataaataaaatttttagtatcagttaataaagatatttgttattttaaataaaccaaaaagaaagttttgtaaatatatgtcacaaaatattaaagaaacacacacaaaatgtttaaaattttttgattgtttttagaaaacatagggagttatactttagtcgcaccacacaatacagaaaagggggtaggtcaaatggaaacaccagtagtacaaccaagggactggacttgttggagttgtttagtatgtgcagcatgttctgtggaattattaaatttagttactgcggcaacaggggctagtactgcaagctaatatcctttcagaagttttttggttaaaagcactaagagaatgagcacttttggtcaaattagactttctaggagaaaaataaataatcaaaaaggagatgttctaaatggaaacaccagtagtacaaccaagggattggacttgttggagttgcttagtatgtgcagcatgttctgtggaattattaaatttagttactgcggcaacaggggctagtactgcaagctaatatcctttcagaagttttttggttaaaagcactaagagaatgagcacttttggtcaaattagactttctaggagaaaaataaataatcaaaaaggagatgttctaaatggaaacaccagtagtacaaccaagggattggacttgttggagttgcttagtatgtgcagcatgttctgtagagttattaaatctagttactgcggcaaccggagctagtactgcaagttaaaattttaaaatgtgagagtgtttatggtgaaattaaattaggacttattctaatgacaaacagttatgttaagaataagtcctatatatttatcgaaaacgagtatgggatttttgtaatacataaactaaaaacaaatttaaattttataggagatgattaaagtgaatggctatttattttggaaagaaaagctagaaataagaaaattcacatcaaattatgaatctatgttggtagttcataaaaacccaaacgaaagcgctcctacgc
